(19) United States
(12) Patent Application Publication
(10) Pub. No.: US 2024/0026407 A1
(43) Pub. Date: Jan. 25, 2024

(54) MODIFICATION OF SAPONINS

(71) Applicant: GLAXOSMITHKLINE BIOLOGICALS SA, Rixensart (BE)

(72) Inventors: Murray BROWN, Stevenage (GB); Edward CHAPMAN, Worthing (GB); Andrew COLLIS, Ulverston (GB); Douglas FUERST, Collegeville, PA (US); Joseph HOSFORD, Stevenage (GB); Christopher MACDERMAID, Collegeville, PA (US); James MORRISON, Collegeville, PA (US)

(73) Assignee: GLAXOSMITHKLINE BIOLOGICALS SA, Rixensart (BE)

(21) Appl. No.: 18/039,514

(22) PCT Filed: Dec. 8, 2021
(86) PCT No.: PCT/EP2021/084813

§ 371 Date: May 31, 2023

Related U.S. Application Data
(60) Provisional application No. 63/123,011, filed on Dec. 9, 2020.
(60) Provisional application No. 63/213,382, filed on Jun. 22, 2021.
(60) Provisional application No. 63/213,407, filed on Jun. 22, 2021.
(60) Provisional application No. 63/213,340, filed on Jun. 22, 2021.

(51) Int. Cl. C12P 19/14; C12N 9/42; C12N 9/24; A61K 39/39

(52) U.S. Cl. CPC C12P 19/14; C12N 9/2445; C12Y 302/01021; C12N 9/2402; C12Y 302/0104; A61K 39/39; A61K 2039/55577

(57) ABSTRACT

Methods for the enzymatic modification of saponins, products made thereby, uses of said products and also to other associated aspects. The saponins may be extracts of Quillaja species, such as extracts of Quillaja saponaria Molina.

### TECHNICAL FIELD

[0001] The present application generally relates to saponins, in particular methods for the enzymatic modification of saponins, products made thereby, uses of said products and also to other associated aspects. The present application further relates to glucosidases and rhamnosidases, in particular mutated glucosidases and rhamnosidases which may be of use in methods for the enzymatic modification of saponins. The saponins may be obtainable from Quillaja species, including extracts obtainable from Quillaja species, such as extracts of Quillaja saponaria Molina.

### BACKGROUND

[0002] Saponins are steroid or terpenoid glycosides. They have a broad range of uses from fire extinguisher foams to food additives and immunostimulants (Reichert, 2019).

[0003] Quillaja extract (E 999) is currently approved by the European Food Safety Authority under EU Regulation 1129/2011 as a food additive in flavoured drinks (14.1.4), cider and perry (14.2.3). Quillaja extract (E 999) is described as being obtained by aqueous extraction of the milled inner bark or wood of Quillaja saponaria, or other Quillaja species. It is also described as containing a number of triterpenoid saponins consisting of glycosides of quillaic acid. Sugars—including glucose, galactose, arabinose, xylose, and rhamnose—are also said to be present, along with tannin, calcium oxalate and other minor components. (EFSA Journal 2019 17(3):5622)

[0004] Saponins have been of interest as immunostimulants for many decades (see, for example, Hyslop, 1969). Quil A is a saponin fraction derived from an aqueous extract from the bark of Quillaja saponaria (Dalsgaard, 1974). Quil A itself contains a plurality of components with the four most predominant Quil A fractions purified by reverse phase chromatography, namely QS-7, QS-17, QS-18 and QS-21, all having immunostimulatory activity although varying in haemolytic activity and toxicity (Kensil, 1991; Kensil, 1995). The main saponin fraction, QS-18, was found to be highly toxic in mice but saponin fractions QS-7 and QS-21 were far less toxic. QS-21, being more abundant than QS-7, has been the most widely studied saponin adjuvant (Ragupathi, 2011).

[0005] Liquid chromatography/mass spectrometry analysis of Quillaja saponaria bark water/methanol extracts has revealed over 100 saponins, many of which have been assigned structures (Nyberg, 2000; Nyberg, 2003; Kite, 2004).

[0006] Quillaja brasiliensis (A St.-Hil & Tul) Mart. extracts have been described, with the identity of various components therein determined by mass spectrometry. Many saponin components in Quillaja brasiliensis extracts correspond to saponins found in Quillaja saponaria extracts (Wallace, 2017; Wallace, 2019) and Quillaja brasiliensis extracts have also been shown to have immunostimulant effects (Cibulski, 2018; Yendo, 2017).

[0007] The Adjuvant System 01 (AS01) is a liposome-based adjuvant which contains two immunostimulants, 3-O-desacyl-4′-monophosphoryl lipid A (3D-MPL) and QS-21 (Garcon, 2011; Didierlaurent, 2017). 3D-MPL is a non-toxic derivative of the lipopolysaccharide from Salmonella minnesota. AS01 is included in vaccines for malaria (RTS, S-Mosquirix™) and Herpes zoster (HZ/su—Shingrix™), and in multiple candidate vaccines. AS01 injection results in rapid and transient activation of innate immunity in animal models. Neutrophils and monocytes are rapidly recruited to the draining lymph node (dLN) upon immunization. Moreover, AS01 induces recruitment and activation of MHCII^{high} dendritic cells (DC), which are necessary for T cell activation (Didierlaurent, 2014). Some data are also available on the mechanism of action of the components of AS01. 3D-MPL signals via TLR4, stimulating NF-κB transcriptional activity and cytokine production and directly activates antigen-presenting cells (APCs) both in humans and in mice (De Becker, 2000; Ismaili, 2002; Martin, 2003; Mata-Haro, 2007). QS-21 promotes high antigen-specific antibody responses and CD8⁺ T-cell responses in mice (Kensil, 1998; Newman, 1992; Soltysik, 1995) and antigen-specific antibody responses in humans (Livingston, 1994). Because of its physical properties, it is thought that QS-21 might act as a danger signal in vivo (Lambrecht, 2009; Li, 2008). Although QS-21 has been shown to activate ASC-NLRP3 inflammasome and subsequent IL-1β/IL-18 release (Marty-Roix, 2016), the exact molecular pathways involved in the adjuvant effect of saponins have yet to be clearly defined.

[0008] Extracts of Quillaja saponaria are commercially available, including fractions thereof with differing degrees of purity such as Quil A, Fraction A, Fraction B, Fraction C, QS-7, QS-17, QS-18 and QS-21.

[0009] The enzymatic hydrolysis of Quil-A by Rapidase® Revelation Aroma has been described during the development of a quality control method to provide a degraded reference sample (Lecas, 2021).

[0010] Availability of saponins is constrained, particularly those obtained from rarer plants or where saponins of interest are present in relatively low amounts. Furthermore, separation of certain saponins from other components, particularly other saponin components which may have similar structures, can be burdensome. Consequently, there remains a need for new methods which may improve the yield of saponins of interest and/or facilitate removal of undesired saponin components.

[0011] Modestobacter marinus glucosidase (Uniparc reference UPI000260A2FA, Uniprot reference I4EYD5) is a naturally occurring glucosidase. There remains a need for further glucosidases which may have improved properties.

[0012] Kribbella flavida rhamnosidase (Uniparc reference UPI00019BDB13, Uniprot reference D2PMT) is a naturally occurring rhamnosidase. There remains a need for further rhamnosidases which may have improved properties.

### SUMMARY OF THE INVENTION

[0013] The present invention provides a method for making a product saponin, said method comprising the step of enzymatically converting a starting saponin to the product saponin. Suitably the method uses a polypeptide of the invention, such as an engineered glucosidase polypeptide or an engineered rhamnosidase polypeptide.

[0014] Also provided is a method for increasing the amount of a product saponin in a composition, said method comprising the step of enzymatically converting a starting saponin to the product saponin. Suitably the method uses a polypeptide of the invention, such as an engineered glucosidase polypeptide or an engineered rhamnosidase polypeptide.

[0015] Further provided is a method for reducing the amount of a starting saponin in a composition, said method comprising the step of enzymatically converting the starting saponin to a product saponin. Suitably the method uses a polypeptide of the invention, such as an engineered glucosidase polypeptide or an engineered rhamnosidase polypeptide.

[0016] The use of a glycosidase for enzymatically converting a starting saponin to a product saponin is also provided by the invention. Suitably the glycosidase is a polypeptide of the invention, such as an engineered glucosidase polypeptide or an engineered rhamnosidase polypeptide.

[0017] Additionally provided is a method for identifying a candidate enzyme having beta exo glucosidase activity, comprising selecting an enzyme comprising, such as consisting of: (i) an amino acid sequence according to SEQ ID No. 262, 208, 63, 229, 250, 5, 101, 207, 169, 247, 302, 324, 319, 9, 240, 325, 338, 850, 879, 868, 826, 804, 888, 881, 891, 816, 827, 857, 853, 842, 814, 886, 885, 838, 829, 808, 828, 870, 873, 844, 882, 874, 825, 824, 823, 810, 894, 849, 803, 890, 841, 832, 830, 845, 871, 837, 883 or 809 or functional variants thereof; or (ii) an amino acid sequence according to SEQ ID No. 262, 208, 63, 229, 250, 5, 101, 207, 169, 247, 302, 324, 319, 9, 240, 325, 338, 850, 879, 868, 826, 804, 888, 881, 891, 816, 827, 857, 853, 842, 814, 886, 885, 838, 829, 808, 828, 870, 873, 844, 882, 874, 825, 824, 823, 810, 894, 849, 803, 890, 841, 832, 830, 845, 871, 837, 883 or 809 or functional variants thereof

[0018] Also provided is a method for identifying a candidate enzyme having alpha exo rhamnosidase activity, comprising selecting an enzyme comprising, such as consisting of, an amino acid sequence according to SEQ ID No. 992, 1003, 1052, 1073, 1017, 1055, 1075, 1001, 1007, 1061, 1079, 1027, 1039, 1041, 989, 1053, 1018, 1066, 1082, 1076, 993, 1077, 1046, 1015, 1063, 1054, 1074, 1067 or 1033, or functional variants thereof.

[0019] Also provided are engineered glucosidase and rhamnosidase polypeptides as further detailed below (referred to as polypeptides of the invention).

[0020] The present invention provides an engineered glucosidase polypeptide comprising, such as consisting of, an amino acid sequence that is at least 80%, 85%, 90%, 95%, 96%, 97%, 98%, or 99% identical to the amino acid sequence of SEQ ID No. 262, or a functional fragment thereof, wherein the engineered glucosidase polypeptide includes at least one residue substitution from:
[0021] F44Y;
[0022] V60L;
[0023] G117A;
[0024] F170N;
[0025] V263G or V263L;
[0026] N351H or N351Q;
[0027] A355H, A355I, A355L, A355M, A355R, A355T or A355W;
[0028] A356P;
[0029] R357A, R357C, R357K, R357M or R357Q;
[0030] G362C;
[0031] T365A, T365N or T365S;
[0032] L367C;
[0033] V394R;
[0034] V395Y;
[0035] Q396E, Q396G, Q396N, Q396P, Q396R, Q396S or Q396Y;
[0036] F430W;
[0037] R435F;
[0038] V438T;
[0039] V440F;
[0040] F442M or F442Q;
[0041] G444T;
[0042] A473F or A473R;
[0043] L474C, L474I or L474V;
[0044] I475F;
[0045] L492C, L492G, L492H, L492I, L492N, L492Q, L492V, L492W or L492Y;
[0046] Q493F or Q493H;
[0047] P494H or P494I;
[0048] S495I, S495K or S495Q;
[0049] G496P or G496W;
[0050] D498A, D498E, D498F, D498I, D498K, D498L, D498N, D498P, D498R, D498S, D498T or D498V;
[0051] A502R;
[0052] M504G or M504R;
[0053] L507A or L507R;
[0054] T508M;
[0055] L529M;
[0056] F535P;
[0057] A536D or A536E;
[0058] A537R;
[0059] F541A, F541I, F541L, F541M or F541V;
[0060] L542I;
[0061] Q543G or Q543L;
[0062] E547L; and
[0063] Y585W.

[0064] The present invention provides an engineered rhamnosidase polypeptide comprising, such as consisting of, an amino acid sequence that is at least 80%, 85%, 90%, 95%, 96%, 97%, 98%, or 99% identical to the amino acid sequence of SEQ ID No. 1017, or a functional fragment thereof, wherein the engineered rhamnosidase polypeptide includes at least one residue substitution from:
[0065] (i) A56C
[0066] (ii) A143P
[0067] (iii) Q181H, Q181R or Q181S
[0068] (iv) L214M
[0069] (v) G215S
[0070] (vi) F216M
[0071] (vii) G218D or G218N
[0072] (viii) K219G
[0073] (ix) A238M
[0074] (x) T252Y
[0075] (xi) T311W
[0076] (xii) V326C
[0077] (xiii) G357C
[0078] (xiv) S369C, S369I, S369K or S369M
[0079] (xv) I487M, I487Q or I487V
[0080] (xvi) K492N
[0081] (xvii) V499T
[0082] (xviii) G508S
[0083] (xix) R543C
[0084] (xx) L557Y
[0085] (xxi) G634A
[0086] (xxii) S635N
[0087] (xxiii) A690C and
[0088] (xxiv) Q921H.

[0089] The invention also provides a saponin prepared by the methods herein, a saponin containing composition comprising a product saponin prepared by the methods herein, adjuvant compositions comprising said saponins or saponin containing compositions, and adjuvant compositions prepared using said saponins or saponin containing compositions. Use of a saponin or saponin containing composition of the invention in the manufacture of an adjuvant composition is also provided.

[0090] Further provided are immunogenic compositions comprising a saponin or saponin containing composition according to the invention and an antigen or a polynucleotide encoding an antigen. Kits comprising (i) a saponin or saponin containing composition according to the invention and (ii) an antigen or a polynucleotide encoding an antigen are also provided.

### BRIEF DESCRIPTION OF THE FIGURES

[0091] FIG. 1 HPLC chromatogram of a crude aqueous Quillaja saponaria bark extract

[0092] FIG. 2 HPLC-UV chromatogram of a crude aqueous Quillaja saponaria bark extract

[0093] FIG. 3 UPLC-UV chromatogram of a crude aqueous Quillaja saponaria bark extract

[0094] FIG. 4 UPLC-UV chromatogram of a polystyrene purified Quillaja saponaria QS-21 saponin extract with low content of 2018 component

[0095] FIG. 5 UPLC-UV/MS chromatogram of a Quillaja saponaria QS-21 purified saponin extract with low content of 2018 component

[0096] FIG. 6 UPLC-UV/MS chromatogram detail of a Quillaja saponaria QS-21 purified saponin extract with low content of 2018 component

[0097] FIG. 7A-7B Extracted mass chromatograms for 1988 (FIG. 7A) and 2002 (FIG. 7B) molecular weight ions of a Quillaja saponaria QS-21 purified saponin extract with low content of 2018 component

[0098] FIG. 8 Combined centroid spectrum of Quillaja saponaria QS-21 purified saponin extract with low content of 2018 component

[0099] FIG. 9 UPLC-UV chromatogram of Quillaja saponaria QS-21 purified saponin extract with low 2018 component

[0100] FIG. 10 LCMS/MS chromatogram for QS-18 2150 (Panel A) and QS-21 1988 (Panel B) component content in QS-21 standard in Example 4-2

[0101] FIG. 11 LCMS/MS chromatogram for QS-18 2150 (Panel A) and QS-21 1988 (Panel B) component content following negative control treatment in Example 4-2

[0102] FIG. 12 LCMS/MS chromatogram for QS-18 2150 (Panel A) and QS-21 1988 (Panel B) component content following glucosidase SEQ ID No. 262 treatment in Example 4-2

[0103] FIG. 13 UV HPLC chromatogram following glucosidase SEQ ID No. 262 treatment (upper trace) and negative control treatment (lower trace) of Crude Bark Extract (CBE) in Example 4-4

[0104] FIG. 14 LCMS/MS chromatogram for QS-17 2296 (Panel A) and QS-18 2150 (Panel B) component content following negative control treatment in Example 6-1

[0105] FIG. 15 LCMS/MS chromatogram for desglucosyl-QS-17 2134 (Panel A) and QS-21 1988 (Panel B) component content following negative control treatment in Example 6-1

[0106] FIG. 16 LCMS/MS chromatogram for QS-17 2310 (Panel A) and QS-18 2164 (Panel B) component content following negative control treatment in Example 6-1

[0107] FIG. 17 LCMS/MS chromatogram for QS-17 2296 (Panel A) and QS-18 2150 (Panel B) component content following rhamnosidase SEQ ID No. 1017 treatment in Example 6-1

[0108] FIG. 18 LCMS/MS chromatogram for desglucosyl-QS-17 2134 (Panel A) and QS-21 1988 (Panel B) component content following rhamnosidase SEQ ID No. 1017 treatment in Example 6-1

[0109] FIG. 19 LCMS/MS chromatogram for QS-17 2310 (Panel A) and QS-18 2164 (Panel B) component content following rhamnosidase SEQ ID No. 1017 treatment in Example 6-1

[0110] FIG. 20 UV HPLC chromatogram following rhamnosidase SEQ ID No. 1017 treatment (upper trace) and negative control treatment (lower trace) of Treated Bark Extract (TBE) in Example 6-2

[0111] FIG. 21 UV HPLC chromatogram following rhamnosidase SEQ ID No. 1017 treatment (upper trace) and negative control treatment (lower trace) of CBE in Example 6-3

[0112] FIG. 22 LCMS/MS chromatogram for QS-21 1988 component content at TO (Panel A) and at 24 hrs (Panel B) following dual enzyme treatment of CBE in Example 7

[0113] FIG. 23A-B Illustrative UV HPLC chromatogram following glucosidase enzyme treatment of CBE (FIG. 23a) and negative control treatment of CBE (FIG. 23b) in Example 8

[0114] FIG. 24 Illustrative UV HPLC chromatogram following rhamnosidase enzyme treatment of CBE (upper trace) and negative control treatment of CBE (lower trace) in Example 9

[0115] FIG. 25 HPLC-UV chromatogram of untreated and enzyme treated CBE at 1 L scale from Example 11

[0116] FIG. 26 UPLC-UV chromatogram following purification of untreated and enzyme treated CBE at 1 L scale from Example 11 (full acquisition)

[0117] FIG. 27 UPLC-UV chromatogram following purification of untreated and enzyme treated CBE at 1 L scale from Example 11 (zoom)

### BRIEF DESCRIPTION OF THE SEQUENCE IDENTIFIERS

[0118] Seq ID No. 1: Amino acid sequence for Cyberlindnera fabianii glucosidase, Uniparc reference UPI00049B1A8C, Uniprot reference A0A061B3J2.
[0119] Seq ID No. 2: Amino acid sequence for Flavobacterium gilvum glucosidase, Uniparc reference UPI0004E3EF7B, Uniprot reference A0A085EII0.
[0120] Seq ID No. 3: Amino acid sequence for Algibacter lectus glucosidase, Uniparc reference UPI00050EE490, Uniprot reference A0A090X649.
[0121] Seq ID No. 4: Amino acid sequence for Microbacterium azadirachtae glucosidase, Uniparc reference UPI0005ECB51E, Uniprot reference A0A0F0LB94.
[0122] Seq ID No. 5: Amino acid sequence for Actinobacteria bacterium glucosidase, Uniparc reference UPI0006588DAD, Uniprot reference A0A0J0UT37.
[0123] Seq ID No. 6: Amino acid sequence for Chloroflexi bacterium glucosidase, Uniparc reference UPI0007968552, Uniprot reference A0A136KWB3.
[0124] Seq ID No. 7: Amino acid sequence for Komagataeibacter rhaeticus glucosidase, Uniparc reference UPI0002080410, Uniprot reference A0A181C809.
[0125] Seq ID No. 8: Amino acid sequence for Bacteroides sp. glucosidase, Uniparc reference UPI0008211BFC, Uniprot reference A0A1C5WEL8.
[0126] Seq ID No. 9: Amino acid sequence for Streptomyces rubrolavendulae glucosidase, Uniparc reference UPI00085A2BD0, Uniprot reference A0A1D8FZW3.
[0127] Seq ID No. 10: Amino acid sequence for Clostridium roseum glucosidase, Uniparc reference UPI00098C60F6, Uniprot reference A0A1S8KYM5.
[0128] Seq ID No. 11: Amino acid sequence for uncultured bacterium glucosidase, Uniparc reference UPI0009CE0D4C, Uniprot reference A0A1V5M6V6.
[0129] Seq ID No. 12: Amino acid sequence for Firmicutes bacterium glucosidase, Uniparc reference UPI0009D4127D, Uniprot reference A0A1V6AN95.
[0130] Seq ID No. 13: Amino acid sequence for Anthracocystis flocculosa glucosidase, Uniparc reference UPI00045601AB, Uniprot reference A0A061H1Z3.
[0131] Seq ID No. 14: Amino acid sequence for Bifidobacterium boum glucosidase, Uniparc reference UPI0004FF77C7, Uniprot reference A0A086ZKU2.
[0132] Seq ID No. 15: Amino acid sequence for Jejuia pallidilutea glucosidase, Uniparc reference UPI00051EDBDE, Uniprot reference A0A098LTR2.
[0133] Seq ID No. 16: Amino acid sequence for Ceratocystis fimbriata glucosidase, Uniparc reference UPI00062105AB, Uniprot reference A0A0F8B2B0.
[0134] Seq ID No. 17: Amino acid sequence for Actinobacteria bacterium glucosidase, Uniparc reference UPI0006583AB1, Uniprot reference A0A0J0UVW7.
[0135] Seq ID No. 18: Amino acid sequence for Rhodococcus sp. glucosidase, Uniparc reference UPI0007AABFAD, Uniprot reference A0A143QAX3.
[0136] Seq ID No. 19: Amino acid sequence for Valsa mali glucosidase, Uniparc reference UPI0007F2D02D, Uniprot reference A0A194VF47.
[0137] Seq ID No. 20: Amino acid sequence for uncultured Bacteroides sp. glucosidase, Uniparc reference UPI000821004D, Uniprot reference A0A1C5WSI4.
[0138] Seq ID No. 21: Amino acid sequence for Eisenbergiella tayi glucosidase, Uniparc reference UPI00084089B2, Uniprot reference A0A1E3ALT2.
[0139] Seq ID No. 22: Amino acid sequence for Streptomyces sp. glucosidase, Uniparc reference UPI000978E914, Uniprot reference A0A1V2MY14.
[0140] Seq ID No. 23: Amino acid sequence for Firmicutes bacterium glucosidase, Uniparc reference UPI0009CBF21C, Uniprot reference A0A1V5MH90.
[0141] Seq ID No. 24: Amino acid sequence for Tenericutes bacterium glucosidase, Uniparc reference UPI0009D5B1F0, Uniprot reference A0A1V6BAK3.
[0142] Seq ID No. 25: Amino acid sequence for Gluconobacter oxydans glucosidase, Uniparc reference UPI0004A87350, Uniprot reference A0A067Z479.
[0143] Seq ID No. 26: Amino acid sequence for Bifidobacterium catenulatum glucosidase, Uniparc reference UPI00050787A2, Uniprot reference A0A087B8Q8.
[0144] Seq ID No. 27: Amino acid sequence for Bionectria ochroleuca glucosidase, Uniparc reference UPI0005965863, Uniprot reference A0A0B7K538.
[0145] Seq ID No. 28: Amino acid sequence for Parcubacteria sp. glucosidase, Uniparc reference UPI0006377CA4, Uniprot reference A0A0G0GD78.
[0146] Seq ID No. 29: Amino acid sequence for Microbacterium ketosireducens glucosidase, Uniparc reference UPI0006228575, Uniprot reference A0A0M2H276.
[0147] Seq ID No. 30: Amino acid sequence for Roseburia faecis glucosidase, Uniparc reference UPI0006C454B4, Uniprot reference A0A173R3W4.
[0148] Seq ID No. 31: Amino acid sequence for Kwoniella dejecticola glucosidase, Uniparc reference UPI0007F1D695, Uniprot reference A0A1A6A050.
[0149] Seq ID No. 32: Amino acid sequence for uncultured Clostridium sp. glucosidase, Uniparc reference UPI0008232A70, Uniprot reference A0A1C6C862.
[0150] Seq ID No. 33: Amino acid sequence for Cyberlindnera jadinii glucosidase, Uniparc reference UPI000866CB30, Uniprot reference A0A1E4S2F8.
[0151] Seq ID No. 34: Amino acid sequence for Bacteroidetes bacterium glucosidase, Uniparc reference UPI0009D3483D, Uniprot reference A0A1V5G4W6.
[0152] Seq ID No. 35: Amino acid sequence for Verrucomicrobia bacterium glucosidase, Uniparc reference UPI0009CC9AEA, Uniprot reference A0A1V5Q4R4.
[0153] Seq ID No. 36: Amino acid sequence for Bacteroidetes bacterium glucosidase, Uniparc reference UPI0009C6DE73, Uniprot reference A0A1V6BV25.
[0154] Seq ID No. 37: Amino acid sequence for Lichtheimia ramosa glucosidase, Uniparc reference UPI0004E051A9, Uniprot reference A0A077WUK7.
[0155] Seq ID No. 38: Amino acid sequence for Bifidobacterium mongoliense glucosidase, Uniparc reference UPI0005060F52, Uniprot reference A0A087BWT7.
[0156] Seq ID No. 39: Amino acid sequence for Vibrio ishigakensis glucosidase, Uniparc reference UPI0005910ED9, Uniprot reference A0A0B8NZY1.
[0157] Seq ID No. 40: Amino acid sequence for Phaeomoniella chlamydospora glucosidase, Uniparc reference UPI00063B706F, Uniprot reference A0A0G2HEV5.
[0158] Seq ID No. 41: Amino acid sequence for Ardenticatena maritima glucosidase, Uniparc reference UPI0006C04F59, Uniprot reference A0A0M8K5H7.
[0159] Seq ID No. 42: Amino acid sequence for Coprococcus comes glucosidase, Uniparc reference UPI000197E031, Uniprot reference A0A173WPC4.
[0160] Seq ID No. 43: Amino acid sequence for Nocardioides dokdonensis glucosidase, Uniparc reference UPI0007DDBAB3, Uniprot reference A0A1A9GNJ0.
[0161] Seq ID No. 44: Amino acid sequence for uncultured Clostridium sp. glucosidase, Uniparc reference UPI000822F7EB, Uniprot reference A0A1C6EBC1.
[0162] Seq ID No. 45: Amino acid sequence for Acetobacterium wieringae glucosidase, Uniparc reference UPI000878EB40, Uniprot reference A0A1F2PFB4.
[0163] Seq ID No. 46: Amino acid sequence for Tenericutes bacterium glucosidase, Uniparc reference UPI0009D0A2C1, Uniprot reference A0A1V5HNJ3.
[0164] Seq ID No. 47: Amino acid sequence for Tenericutes bacterium glucosidase, Uniparc reference UPI0009CB8A73, Uniprot reference A0A1V5UFI1.
[0165] Seq ID No. 48: Amino acid sequence for uncultured bacterium glucosidase, Uniparc reference UPI0009CC90AF, Uniprot reference A0A1V6CDT2.
[0166] Seq ID No. 49: Amino acid sequence for Parabacteroides distasonis glucosidase, Uniparc reference UPI0004D8E473, Uniprot reference A0A078SYD0.
[0167] Seq ID No. 50: Amino acid sequence for Bifidobacterium psychraerophilum glucosidase, Uniparc reference UPI0005006C6A, Uniprot reference A0A087CJB0.
[0168] Seq ID No. 51: Amino acid sequence for Hebeloma cylindrosporum glucosidase, Uniparc reference UPI00059A3BA8, Uniprot reference A0A0C2YJF2.
[0169] Seq ID No. 52: Amino acid sequence for Brenneria goodwinii glucosidase, Uniparc reference UPI0006579FEA, Uniprot reference A0A0G4JRR8.
[0170] Seq ID No. 53: Amino acid sequence for Aspergillus calidoustus glucosidase, Uniparc reference UPI00073C9E60, Uniprot reference A0A0U5GN20.
[0171] Seq ID No. 54: Amino acid sequence for Bacteroides finegoldii glucosidase, Uniparc reference UPI0006C6E0C3, Uniprot reference A0A174BEZ2.
[0172] Seq ID No. 55: Amino acid sequence for Altererythrobacter dongtanensis glucosidase, Uniparc reference UPI0008153D6D, Uniprot reference A0A1B2A943.
[0173] Seq ID No. 56: Amino acid sequence for uncultured Anaerotruncus sp. glucosidase, Uniparc reference UPI0008206E7B, Uniprot reference A0A1C6FWD9.
[0174] Seq ID No. 57: Amino acid sequence for Candidatus firestone glucosidase, Uniparc reference UPI0008AC0E17, Uniprot reference A0A1F5UJR6.
[0175] Seq ID No. 58: Amino acid sequence for Tenericutes bacterium glucosidase, Uniparc reference UPI0009C6C8E4, Uniprot reference A0A1V5HS22.
[0176] Seq ID No. 59: Amino acid sequence for Lentisphaerae bacterium glucosidase, Uniparc reference UPI0009CEE1AB, Uniprot reference A0A1V5VBL2.
[0177] Seq ID No. 60: Amino acid sequence for Planctomycetes bacterium glucosidase, Uniparc reference UPI0009CAAB0A, Uniprot reference A0A1V6FZ47.
[0178] Seq ID No. 61: Amino acid sequence for Pseudallescheria apiosperma glucosidase, Uniparc reference UPI0004DD62AC, Uniprot reference A0A084G332.
[0179] Seq ID No. 62: Amino acid sequence for Nonlabens sediminis glucosidase, Uniparc reference UPI000507F00A, Uniprot reference A0A090Q4N8.
[0180] Seq ID No. 63: Amino acid sequence for Gynuella sunshinyii glucosidase, Uniparc reference UPI0005CC42CA, Uniprot reference A0A0C5VDU3.
[0181] Seq ID No. 64: Amino acid sequence for Verticillium longisporum glucosidase, Uniparc reference UPI00063E4005, Uniprot reference A0A0G4N9Q7.
[0182] Seq ID No. 65: Amino acid sequence for Cellulomonas sp. glucosidase, Uniparc reference UPI00073C6CD3, Uniprot reference A0A0V8TAB5.
[0183] Seq ID No. 66: Amino acid sequence for Hungatella hathewayi glucosidase, Uniparc reference UPI0006C024BB, Uniprot reference A0A174FBX7.
[0184] Seq ID No. 67: Amino acid sequence for Mesorhizobium sp. glucosidase, Uniparc reference UPI000688E74D, Uniprot reference A0A1C2DG64.
[0185] Seq ID No. 68: Amino acid sequence for Clostridium sp. glucosidase, Uniparc reference UPI000822FAB7, Uniprot reference A0A1C6GRT5.
[0186] Seq ID No. 69: Amino acid sequence for Chlamydiales bacterium glucosidase, Uniparc reference UPI0009284E74, Uniprot reference A0A1M3CSY6.
[0187] Seq ID No. 70: Amino acid sequence for Spirochaetes bacterium glucosidase, Uniparc reference UPI0009CB461D, Uniprot reference A0A1V5HUX3.
[0188] Seq ID No. 71: Amino acid sequence for bacterium glucosidase, Uniparc reference UPI0009C92D6A, Uniprot reference A0A1V5VHB9.
[0189] Seq ID No. 72: Amino acid sequence for Thermotogae bacterium glucosidase, Uniparc reference UPI0009D12B86, Uniprot reference A0A1V6H2W5.
[0190] Seq ID No. 73: Amino acid sequence for Pseudallescheria apiosperma glucosidase, Uniparc reference UPI0004DCBED3, Uniprot reference A0A084GGE2.
[0191] Seq ID No. 74: Amino acid sequence for Algibacter lectus glucosidase, Uniparc reference UPI00050E0BE3, Uniprot reference A0A090VF17.
[0192] Seq ID No. 75: Amino acid sequence for Paxillus involutus glucosidase, Uniparc reference UPI0005B075C8, Uniprot reference A0A0C9TWP5.
[0193] Seq ID No. 76: Amino acid sequence for Verticillium longisporum glucosidase, Uniparc reference UPI00063DF006, Uniprot reference A0A0G4NA55.
[0194] Seq ID No. 77: Amino acid sequence for Mucilaginibacter gotjawali glucosidase, Uniparc reference UPI00076F8EA4, Uniprot reference A0A110B1H1.
[0195] Seq ID No. 78: Amino acid sequence for Bacteroides uniformis glucosidase, Uniparc reference UPI0006C0FFEF, Uniprot reference A0A174IWW4.
[0196] Seq ID No. 79: Amino acid sequence for Coprococcus sp. glucosidase, Uniparc reference UPI0008222B77, Uniprot reference A0A1C5W0N6.
[0197] Seq ID No. 80: Amino acid sequence for Blautia sp. glucosidase, Uniparc reference UPI0006C36823, Uniprot reference A0A1C6K2X5.
[0198] Seq ID No. 81: Amino acid sequence for Cellulomonas sp. glucosidase, Uniparc reference UPI00092B3CD4, Uniprot reference A0A1M3ELH4.
[0199] Seq ID No. 82: Amino acid sequence for bacterium glucosidase, Uniparc reference UPI0009C85428, Uniprot reference A0A1V5J984.
[0200] Seq ID No. 83: Amino acid sequence for Spirochaetes bacterium glucosidase, Uniparc reference UPI0009CA1D5C, Uniprot reference A0A1V5WHQ7.
[0201] Seq ID No. 84: Amino acid sequence for Tenericutes bacterium glucosidase, Uniparc reference UPI0009C7041F, Uniprot reference A0A1V6IJ57.
[0202] Seq ID No. 85: Amino acid sequence for Flavobacterium gilvum glucosidase, Uniparc reference UPI0004E2A41F, Uniprot reference A0A085EG29.
[0203] Seq ID No. 86: Amino acid sequence for Algibacter lectus glucosidase, Uniparc reference UPI0005102470, Uniprot reference A0A090WWZ1.
[0204] Seq ID No. 87: Amino acid sequence for Hydnomerulius pinastri glucosidase, Uniparc reference UPI0005B0F0AE, Uniprot reference A0A0C9WDY0.
[0205] Seq ID No. 88: Amino acid sequence for Nocardia farcinica glucosidase, Uniparc reference UPI00065C2666, Uniprot reference A0A0H5NWN2.
[0206] Seq ID No. 89: Amino acid sequence for Bacteroides cellulosilyticus glucosidase, Uniparc reference UPI000760375B, Uniprot reference A0A125MG18.
[0207] Seq ID No. 90: Amino acid sequence for Fonsecaea erecta glucosidase, Uniparc reference UPI0007DF4250, Uniprot reference A0A178ZBN2.
[0208] Seq ID No. 91: Amino acid sequence for Bacteroides sp. glucosidase, Uniparc reference UPI0008209852, Uniprot reference A0A1C5W9N9.
[0209] Seq ID No. 92: Amino acid sequence for Tannerella forsythia glucosidase, Uniparc reference UPI00086C34C1, Uniprot reference A0A1D3UGH8.
[0210] Seq ID No. 93: Amino acid sequence for Microbacterium esteraromaticum glucosidase, Uniparc reference UPI00097E83BB, Uniprot reference A0A1R4KI92.
[0211] Seq ID No. 94: Amino acid sequence for bacterium glucosidase, Uniparc reference UPI0009D255E5, Uniprot reference A0A1V5LJK9.
[0212] Seq ID No. 95: Amino acid sequence for Candidatus hydrogenedentes glucosidase, Uniparc reference UPI0009C5A3CF, Uniprot reference A0A1V5Z2L2.
[0213] Seq ID No. 96: Amino acid sequence for Bacteroidetes bacterium glucosidase, Uniparc reference UPI0009C55799, Uniprot reference A0A1V6J4J8.
[0214] Seq ID No. 97: Amino acid sequence for Penicillium solitum glucosidase, Uniparc reference UPI0009D4067F, Uniprot reference A0A1V6RQ41.
[0215] Seq ID No. 98: Amino acid sequence for Weissella soli glucosidase, Uniparc reference UPI0008737AA2, Uniprot reference A0A288Q8I2.
[0216] Seq ID No. 99: Amino acid sequence for Acetatifactor muris glucosidase, Uniparc reference UPI000CAC57D4, Uniprot reference A0A2K4ZN91.
[0217] Seq ID No. 100: Amino acid sequence for Corynespora cassiicola glucosidase, Uniparc reference UPI000D237A4A, Uniprot reference A0A2T2NYD4.
[0218] Seq ID No. 101: Amino acid sequence for Meira miltonrushii glucosidase, Uniparc reference UPI000D77C91D, Uniprot reference A0A316V6M3.
[0219] Seq ID No. 102: Amino acid sequence for Bacteroides fragilis glucosidase, Uniparc reference UPI00004E1F76, Uniprot reference A0A380YVC7.
[0220] Seq ID No. 103: Amino acid sequence for Malassezia restricta glucosidase, Uniparc reference UPI000F0C30E8, Uniprot reference A0A3G2SB79.
[0221] Seq ID No. 104: Amino acid sequence for Fusarium euwallaceae glucosidase, Uniparc reference UPI000FFFEFB2, Uniprot reference A0A430LYA2.
[0222] Seq ID No. 105: Amino acid sequence for Psathyrella aberdarensis glucosidase, Uniparc reference UPI0010251887, Uniprot reference A0A4Q2E070.
[0223] Seq ID No. 106: Amino acid sequence for Aeromonas hydrophila glucosidase, Uniparc reference UPI0000E69509, Uniprot reference A0KLP6.
[0224] Seq ID No. 107: Amino acid sequence for Saccharopolyspora erythraea glucosidase, Uniparc reference UPI00000B86CB, Uniprot reference A4F7P9.
[0225] Seq ID No. 108: Amino acid sequence for Streptomyces sviceus glucosidase, Uniparc reference UPI000180240E, Uniprot reference B5I181.
[0226] Seq ID No. 109: Amino acid sequence for Naematelia encephala glucosidase, Uniparc reference UPI000A250F78, Uniprot reference A0A1Y2AWB7.
[0227] Seq ID No. 110: Amino acid sequence for Hartmannibacter diazotrophicus glucosidase, Uniparc reference UPI000C0221F1, Uniprot reference A0A2C9D6I2.
[0228] Seq ID No. 111: Amino acid sequence for Pontimonas salivibrio glucosidase, Uniparc reference UPI000CEB5AB1, Uniprot reference A0A2L2BPE2.
[0229] Seq ID No. 112: Amino acid sequence for Cadophora sp. glucosidase, Uniparc reference UPI000D5B9C38, Uniprot reference A0A2V1CH24.
[0230] Seq ID No. 113: Amino acid sequence for Meira miltonrushii glucosidase, Uniparc reference UPI000D779558, Uniprot reference A0A316V8S0.
[0231] Seq ID No. 114: Amino acid sequence for Monilinia fructigena glucosidase, Uniparc reference UPI000DC42E3D, Uniprot reference A0A395IJW4.
[0232] Seq ID No. 115: Amino acid sequence for Hortaea werneckii glucosidase, Uniparc reference UPI000F3E476C, Uniprot reference A0A3M6XGS0.
[0233] Seq ID No. 116: Amino acid sequence for Streptomyces netropsis glucosidase, Uniparc reference UPI00101460D7, Uniprot reference A0A445N7U0.
[0234] Seq ID No. 117: Amino acid sequence for Aureobasidium pullulans glucosidase, Uniparc reference UPI001139C6A8, Uniprot reference A0A4S9IFI0.
[0235] Seq ID No. 118: Amino acid sequence for Aspergillus clavatus glucosidase, Uniparc reference UPI0000EA5CFF, Uniprot reference A1CTN9.
[0236] Seq ID No. 119: Amino acid sequence for Clavibacter michiganensis glucosidase, Uniparc reference UPI0001523037, Uniprot reference A5CT94.
[0237] Seq ID No. 120: Amino acid sequence for Penicillium rubens glucosidase, Uniparc reference UPI0001831CF5, Uniprot reference B6H7R5.
[0238] Seq ID No. 121: Amino acid sequence for Lachnoclostridium sp. glucosidase, Uniparc reference UPI000B365547, Uniprot reference A0A1Y4NTL9.
[0239] Seq ID No. 122: Amino acid sequence for Rhodobacteraceae bacterium glucosidase, Uniparc reference UPI000C09BF88, Uniprot reference A0A2D5IXB9.
[0240] Seq ID No. 123: Amino acid sequence for Bacteroides fragilis glucosidase, Uniparc reference UPI0004B5EEF2, Uniprot reference A0A2M9UUC4.
[0241] Seq ID No. 124: Amino acid sequence for Aspergillus indologenus glucosidase, Uniparc reference UPI000D7FE1ED, Uniprot reference A0A2V5IY78.
[0242] Seq ID No. 125: Amino acid sequence for Acaromyces ingoldii glucosidase, Uniparc reference UPI000D802B25, Uniprot reference A0A316YR39.
[0243] Seq ID No. 126: Amino acid sequence for Monilinia fructigena glucosidase, Uniparc reference UPI000DC60823, Uniprot reference A0A395J1U5.
[0244] Seq ID No. 127: Amino acid sequence for Paenibacillus xylanexedens glucosidase, Uniparc reference UPI000F52D773, Uniprot reference A0A3N6CA02.
[0245] Seq ID No. 128: Amino acid sequence for Actinomyces howellii glucosidase, Uniparc reference UPI000F6DAAAE, Uniprot reference A0A448HIG0.
[0246] Seq ID No. 129: Amino acid sequence for Friedmanniomyces endolithicus glucosidase, Uniparc reference UPI00113D19DF, Uniprot reference A0A4V5N9I4.
[0247] Seq ID No. 130: Amino acid sequence for Neosartorya fischeri glucosidase, Uniparc reference UPI0000EA8672, Uniprot reference A1DNS0.
[0248] Seq ID No. 131: Amino acid sequence for Pseudomonas aeruginosa glucosidase, Uniparc reference UPI0000D7314B, Uniprot reference A6V4K6.
[0249] Seq ID No. 132: Amino acid sequence for Talaromyces stipitatus glucosidase, Uniparc reference UPI00018E7266, Uniprot reference B8MF24.
[0250] Seq ID No. 133: Amino acid sequence for Aquimixticola soesokkakensis glucosidase, Uniparc reference UPI000A1A5FD7, Uniprot reference A0A1Y5RVF8.
[0251] Seq ID No. 134: Amino acid sequence for Rhodobacterales bacterium glucosidase, Uniparc reference UPI000C98D37C, Uniprot reference A0A2D9YGV1.
[0252] Seq ID No. 135: Amino acid sequence for Methylorubrum extorquens glucosidase, Uniparc reference UPI0006F9793E, Uniprot reference A0A2N9AS40.
[0253] Seq ID No. 136: Amino acid sequence for Clostridium perfringens glucosidase, Uniparc reference UPI00000CF7C8, Uniprot reference A0A2X2YBP0.
[0254] Seq ID No. 137: Amino acid sequence for Acholeplasmatales bacterium glucosidase, Uniparc reference UPI0008AEBEA3, Uniprot reference A0A348NID6.
[0255] Seq ID No. 138: Amino acid sequence for Bacteroidetes bacterium glucosidase, Uniparc reference UPI000EC3C979, Uniprot reference A0A3B8VHE8.
[0256] Seq ID No. 139: Amino acid sequence for Clostridium carnis glucosidase, Uniparc reference UPI000F637E38, Uniprot reference A0A3P6K8E8.
[0257] Seq ID No. 140: Amino acid sequence for Mycolicibacterium flavescens glucosidase, Uniparc reference UPI000B93B5C9, Uniprot reference A0A448HNB5.
[0258] Seq ID No. 141: Amino acid sequence for Streptococcus gallolyticus glucosidase, Uniparc reference UPI000F6EFA71, Uniprot reference A0A4V6LJ94.
[0259] Seq ID No. 142: Amino acid sequence for Yersinia enterocolitica glucosidase, Uniparc reference UPI0000EB54CC, Uniprot reference A1JNB7.
[0260] Seq ID No. 143: Amino acid sequence for Anaeromyxobacter sp. glucosidase, Uniparc reference UPI0000ED8A80, Uniprot reference A7HFG4.
[0261] Seq ID No. 144: Amino acid sequence for Talaromyces stipitatus glucosidase, Uniparc reference UPI00018E7D70, Uniprot reference B8MK55.
[0262] Seq ID No. 145: Amino acid sequence for Hortaea werneckii glucosidase, Uniparc reference UPI000A2E3FAA, Uniprot reference A0A1Z5SL14.
[0263] Seq ID No. 146: Amino acid sequence for Micavibrio sp. glucosidase, Uniparc reference UPI000C529025, Uniprot reference A0A2E2Q8X2.
[0264] Seq ID No. 147: Amino acid sequence for Acidobacteriia bacterium glucosidase, Uniparc reference UPI000CE6B996, Uniprot reference A0A2N9MBS0.
[0265] Seq ID No. 148: Amino acid sequence for Corynebacterium jeikeium glucosidase, Uniparc reference UPI000DA3A972, Uniprot reference A0A2X4T570.
[0266] Seq ID No. 149: Amino acid sequence for Clostridiaceae bacterium glucosidase, Uniparc reference UPI000E8D37A1, Uniprot reference A0A353PZH8.
[0267] Seq ID No. 150: Amino acid sequence for Anaerolineaceae bacterium glucosidase, Uniparc reference UPI000748C096, Uniprot reference A0A3B9PA35.
[0268] Seq ID No. 151: Amino acid sequence for Gymnopilus dilepis glucosidase, Uniparc reference UPI000FF41956, Uniprot reference A0A409WSY0.
[0269] Seq ID No. 152: Amino acid sequence for Kocuria rosea glucosidase, Uniparc reference UPI000F7105D4, Uniprot reference A0A448R8N0.
[0270] Seq ID No. 153: Amino acid sequence for Teredinibacter sp. glucosidase, Uniparc reference UPI0011696FAB, Uniprot reference A0A509DWZ3.
[0271] Seq ID No. 154: Amino acid sequence for Aspergillus niger glucosidase, Uniparc reference UPI0000EFB564, Uniprot reference A2QS42.
[0272] Seq ID No. 155: Amino acid sequence for Laccaria bicolor glucosidase, Uniparc reference UPI000164423D, Uniprot reference B0D734.
[0273] Seq ID No. 156: Amino acid sequence for Podosphaera parvula glucosidase, Uniparc reference UPI00017357F6, Uniprot reference B9XH33.
[0274] Seq ID No. 157: Amino acid sequence for Megamonas hypermegale glucosidase, Uniparc reference UPI00042469F6, Uniprot reference A0A239TGH2.
[0275] Seq ID No. 158: Amino acid sequence for Armillaria gallica glucosidase, Uniparc reference UPI000BC209C3, Uniprot reference A0A2H3E300.
[0276] Seq ID No. 159: Amino acid sequence for Micromonospora sp. glucosidase, Uniparc reference UPI000D2EAE87, Uniprot reference A0A2P8AV03.
[0277] Seq ID No. 160: Amino acid sequence for Klebsiella oxytoca glucosidase, Uniparc reference UPI000DA286EE, Uniprot reference A0A2X5CJC5.
[0278] Seq ID No. 161: Amino acid sequence for Candidatus ozemobacter glucosidase, Uniparc reference UPI000DFAEF6C, Uniprot reference A0A367ZIH8.
[0279] Seq ID No. 162: Amino acid sequence for Coleophoma crateriformis glucosidase, Uniparc reference UPI000E399EE8, Uniprot reference A0A3D8R2C2.
[0280] Seq ID No. 163: Amino acid sequence for Apiotrichum porosum glucosidase, Uniparc reference UPI000FBC01E3, Uniprot reference A0A427XHS2.
[0281] Seq ID No. 164: Amino acid sequence for Acholeplasma hippikon glucosidase, Uniparc reference UPI00068E4E50, Uniprot reference A0A449BJ27.
[0282] Seq ID No. 165: Amino acid sequence for Streptomyces spectabilis glucosidase, Uniparc reference UPI001185F074, Uniprot reference A0A516RGT1.
[0283] Seq ID No. 166: Amino acid sequence for Aspergillus niger glucosidase, Uniparc reference UPI0000EFCED2, Uniprot reference A2R8G2.
[0284] Seq ID No. 167: Amino acid sequence for Xanthomonas campestris glucosidase, Uniparc reference UPI00000D8BFA, Uniprot reference B0RYA0.
[0285] Seq ID No. 168: Amino acid sequence for Lactobacillus paracasei glucosidase, Uniparc reference UPI00019C9CD7, Uniprot reference C2FDL2.
[0286] Seq ID No. 169: Amino acid sequence for Bifiguratus adelaidae glucosidase, Uniparc reference UPI000BC490A3, Uniprot reference A0A261XUH4.
[0287] Seq ID No. 170: Amino acid sequence for bacterium glucosidase, Uniparc reference UPI000CC31AE2, Uniprot reference A0A2H5YYA1.
[0288] Seq ID No. 171: Amino acid sequence for Actinomadura parvosata glucosidase, Uniparc reference UPI000D26C9C6, Uniprot reference A0A2P9IY35.
[0289] Seq ID No. 172: Amino acid sequence for Melissococcus plutonius glucosidase, Uniparc reference UPI00024F22B8, Uniprot reference A0A2Z5Y4P3.
[0290] Seq ID No. 173: Amino acid sequence for Enterococcus durans glucosidase, Uniparc reference UPI000E020871, Uniprot reference A0A377KJS3.
[0291] Seq ID No. 174: Amino acid sequence for Malassezia restricta glucosidase, Uniparc reference UPI000DD17A7D, Uniprot reference A0A3G2S2J6.
[0292] Seq ID No. 175: Amino acid sequence for Apiotrichum porosum glucosidase, Uniparc reference UPI000FA2DE87, Uniprot reference A0A427XZQ0.
[0293] Seq ID No. 176: Amino acid sequence for Streptomonospora sp. glucosidase, Uniparc reference UPI0010355193, Uniprot reference A0A4P6PWP5.
[0294] Seq ID No. 177: Amino acid sequence for Lactobacillus gasseri glucosidase, Uniparc reference UPI00119640A1, Uniprot reference A0A558LH47.
[0295] Seq ID No. 178: Amino acid sequence for Aspergillus niger glucosidase, Uniparc reference UPI0000EFD0AA, Uniprot reference A2RAJ1.
[0296] Seq ID No. 179: Amino acid sequence for Neosartorya fumigata glucosidase, Uniparc reference UPI000170BF91, Uniprot reference B0XXG1.
[0297] Seq ID No. 180: Amino acid sequence for Eubacterium eligens glucosidase, Uniparc reference UPI0001A5B234, Uniprot reference C4Z6T5.
[0298] Seq ID No. 181: Amino acid sequence for Bifiguratus adelaidae glucosidase, Uniparc reference UPI000BC64A75, Uniprot reference A0A261XVM8.
[0299] Seq ID No. 182: Amino acid sequence for bacterium glucosidase, Uniparc reference UPI000CAA854E, Uniprot reference A0A2H6EX57.
[0300] Seq ID No. 183: Amino acid sequence for Corynespora cassiicola glucosidase, Uniparc reference UPI000D24EC2C, Uniprot reference A0A2T2N5H9.
[0301] Seq ID No. 184: Amino acid sequence for Pseudomicrostroma glucosiphilum glucosidase, Uniparc reference UPI000D77A0B7, Uniprot reference A0A316UK83.
[0302] Seq ID No. 185: Amino acid sequence for Staphylococcus saprophyticus glucosidase, Uniparc reference UPI0002DAAFCC, Uniprot reference A0A380HD31.
[0303] Seq ID No. 186: Amino acid sequence for Malassezia restricta glucosidase, Uniparc reference UPI000F0C6B8E, Uniprot reference A0A3G2S932.
[0304] Seq ID No. 187: Amino acid sequence for Saitozyma podzolica glucosidase, Uniparc reference UPI000FBA70E2, Uniprot reference A0A427YCL1.
[0305] Seq ID No. 188: Amino acid sequence for Tremella mesenterica glucosidase, Uniparc reference UPI00102822B4, Uniprot reference A0A4Q1BRC6.
[0306] Seq ID No. 189: Amino acid sequence for Arthrobacter sp. glucosidase, Uniparc reference UPI0000527506, Uniprot reference A0JZ86.
[0307] Seq ID No. 190: Amino acid sequence for Scheffersomyces stipitis glucosidase, Uniparc reference UPI000157388C, Uniprot reference A3LRB0.
[0308] Seq ID No. 191: Amino acid sequence for Leptothrix cholodnii glucosidase, Uniparc reference UPI0001712E02, Uniprot reference B1XZK8.
[0309] Seq ID No. 192: Amino acid sequence for Thauera sp. glucosidase, Uniparc reference UPI000166883C, Uniprot reference C4ZLL7.
[0310] Seq ID No. 193: Amino acid sequence for Kosmotoga olearia glucosidase, Uniparc reference UPI00018494AB, Uniprot reference C5CDW5.
[0311] Seq ID No. 194: Amino acid sequence for Roseburia intestinalis glucosidase, Uniparc reference UPI0001CD671F, Uniprot reference D4L3Y2.
[0312] Seq ID No. 195: Amino acid sequence for Streptococcus equinus glucosidase, Uniparc reference UPI0001E0DC00, Uniprot reference E0PDF8.
[0313] Seq ID No. 196: Amino acid sequence for Streptococcus cristatus glucosidase, Uniparc reference UPI0001F80C4B, Uniprot reference E8JUK5.
[0314] Seq ID No. 197: Amino acid sequence for Cellulosilyticum lentocellum glucosidase, Uniparc reference UPI0001D2DBBC, Uniprot reference F2JLH3.
[0315] Seq ID No. 198: Amino acid sequence for Streptococcus gallolyticus glucosidase, Uniparc reference UPI0001C48657, Uniprot reference F5WYI5.
[0316] Seq ID No. 199: Amino acid sequence for Ketogulonicigenium vulgare glucosidase, Uniparc reference UPI00021D443A, Uniprot reference F9Y8Z7.
[0317] Seq ID No. 200: Amino acid sequence for Spathaspora passalidarum glucosidase, Uniparc reference UPI000228255D, Uniprot reference G3AGX1.
[0318] Seq ID No. 201: Amino acid sequence for Niastella koreensis glucosidase, Uniparc reference UPI00023F6F5F, Uniprot reference G8T9J3.
[0319] Seq ID No. 202: Amino acid sequence for Cellvibrio sp. glucosidase, Uniparc reference UPI000260108C, Uniprot reference I3IDC0.
[0320] Seq ID No. 203: Amino acid sequence for Flavobacterium sp. glucosidase, Uniparc reference UPI000272D1E0, Uniprot reference J1ACA0.
[0321] Seq ID No. 204: Amino acid sequence for Macrophomina phaseolina glucosidase, Uniparc reference UPI00028E7FE1, Uniprot reference K2S5D3.
[0322] Seq ID No. 205: Amino acid sequence for Kosmotoga olearia glucosidase, Uniparc reference UPI00018483A2, Uniprot reference C5CHI5.
[0323] Seq ID No. 206: Amino acid sequence for Blautia obeum glucosidase, Uniparc reference UPI0001CD5918, Uniprot reference D4LRF6.
[0324] Seq ID No. 207: Amino acid sequence for Bifidobacterium dentium glucosidase, Uniparc reference UPI0001E18CDA, Uniprot reference E0Q541.
[0325] Seq ID No. 208: Amino acid sequence for Anaerolinea thermophila glucosidase, Uniparc reference UPI0001F55F8F, Uniprot reference E8N5R8.
[0326] Seq ID No. 209: Amino acid sequence for Coriobacterium glomerans glucosidase, Uniparc reference UPI0002050DA2, Uniprot reference F2N7E4.
[0327] Seq ID No. 210: Amino acid sequence for Microlunatus phosphovorus glucosidase, Uniparc reference UPI000210C886, Uniprot reference F5XJQ3.
[0328] Seq ID No. 211: Amino acid sequence for Streptomyces sp. glucosidase, Uniparc reference UPI0001C18877, Uniprot reference G0Q1U8.
[0329] Seq ID No. 212: Amino acid sequence for Spathaspora passalidarum glucosidase, Uniparc reference UPI0002282B61, Uniprot reference G3AIV6.
[0330] Seq ID No. 213: Amino acid sequence for Glarea lozoyensis glucosidase, Uniparc reference UPI0002402F4A, Uniprot reference H0ET34.
[0331] Seq ID No. 214: Amino acid sequence for Glaciozyma antarctica glucosidase, Uniparc reference UPI0002633B36, Uniprot reference I3UJK0.
[0332] Seq ID No. 215: Amino acid sequence for Arthrobacter sp. glucosidase, Uniparc reference UPI00027DFD35, Uniprot reference J7LN00.
[0333] Seq ID No. 216: Amino acid sequence for Fusarium pseudograminearum glucosidase, Uniparc reference UPI00028D698C, Uniprot reference K3VMA9.
[0334] Seq ID No. 217: Amino acid sequence for Hypocrea rufa glucosidase, Uniparc reference UPI000006AA61, Uniprot reference C6GGC9.
[0335] Seq ID No. 218: Amino acid sequence for Ruminococcus torques glucosidase, Uniparc reference UPI0001CDA964, Uniprot reference D4M6W6.
[0336] Seq ID No. 219: Amino acid sequence for Bifidobacterium dentium glucosidase, Uniparc reference UPI0001E17370, Uniprot reference E0Q9Z7.
[0337] Seq ID No. 220: Amino acid sequence for Bacteroides salanitronis glucosidase, Uniparc reference UPI0001FC71F6, Uniprot reference F0R2D7.
[0338] Seq ID No. 221: Amino acid sequence for Bacteroides coprosuis glucosidase, Uniparc reference UPI00020E6D19, Uniprot reference F3ZQ40.
[0339] Seq ID No. 222: Amino acid sequence for Marinomonas posidonica glucosidase, Uniparc reference UPI00020D4CC6, Uniprot reference F6CWF6.
[0340] Seq ID No. 223: Amino acid sequence for Chaetomium thermophilum glucosidase, Uniparc reference UPI000227E8ED, Uniprot reference G0SE64.
[0341] Seq ID No. 224: Amino acid sequence for Tetragenococcus halophilus glucosidase, Uniparc reference UPI00022B9A15, Uniprot reference G4L5K1.
[0342] Seq ID No. 225: Amino acid sequence for Paenibacillus sp. glucosidase, Uniparc reference UPI00024F0867, Uniprot reference H6CCZ8.
[0343] Seq ID No. 226: Amino acid sequence for Turneriella parva glucosidase, Uniparc reference UPI000265AA4B, Uniprot reference I4B8U7.
[0344] Seq ID No. 227: Amino acid sequence for Arthrobacter sp. glucosidase, Uniparc reference UPI00027DFDB2, Uniprot reference J7LQK9.
[0345] Seq ID No. 228: Amino acid sequence for Agaricus bisporus glucosidase, Uniparc reference UPI00029074B1, Uniprot reference K5W7V1.
[0346] Seq ID No. 229: Amino acid sequence for Nectria haematococca glucosidase, Uniparc reference UPI0001B67634, Uniprot reference C7YIP3.
[0347] Seq ID No. 230: Amino acid sequence for Bacteroides xylanisolvens glucosidase, Uniparc reference UPI0001A25287, Uniprot reference D4VSZ0.
[0348] Seq ID No. 231: Amino acid sequence for Sediminispirochaeta smaragdinae glucosidase, Uniparc reference UPI0001DD9790, Uniprot reference E1R331.
[0349] Seq ID No. 232: Amino acid sequence for Deinococcus proteolyticus glucosidase, Uniparc reference UPI0001FC42E9, Uniprot reference F0RPV2.
[0350] Seq ID No. 233: Amino acid sequence for Sphingobacterium sp. glucosidase, Uniparc reference UPI0002033A0A, Uniprot reference F4C226.
[0351] Seq ID No. 234: Amino acid sequence for Sphingobium chlorophenolicum glucosidase, Uniparc reference UPI0001E54133, Uniprot reference F6ET40.
[0352] Seq ID No. 235: Amino acid sequence for Caloramator australicus glucosidase, Uniparc reference UPI00021CACC4, Uniprot reference G0V3V5.
[0353] Seq ID No. 236: Amino acid sequence for Commensalibacter intestini glucosidase, Uniparc reference UPI000230E3BF, Uniprot reference G6F370.
[0354] Seq ID No. 237: Amino acid sequence for Paenibacillus sp. glucosidase, Uniparc reference UPI00024F07AC, Uniprot reference H6CIT2.
[0355] Seq ID No. 238: Amino acid sequence for Nitrolancea hollandica glucosidase, Uniparc reference UPI0002638AF3, Uniprot reference I4EIA9.
[0356] Seq ID No. 239: Amino acid sequence for Cryptococcus neoformans glucosidase, Uniparc reference UPI000392C3ED, Uniprot reference J9VVK7.
[0357] Seq ID No. 240: Amino acid sequence for Acidipropionibacterium acidipropionici glucosidase, Uniparc reference UPI0002988588, Uniprot reference K75596.
[0358] Seq ID No. 241: Amino acid sequence for Prevotella sp. glucosidase, Uniparc reference UPI0001B93465, Uniprot reference C9PT75.
[0359] Seq ID No. 242: Amino acid sequence for Rhodobacter capsulatus glucosidase, Uniparc reference UPI0001D08095, Uniprot reference D5ALU0.
[0360] Seq ID No. 243: Amino acid sequence for Stigmatella aurantiaca glucosidase, Uniparc reference UPI0001E74370, Uniprot reference E3FJ05.
[0361] Seq ID No. 244: Amino acid sequence for Sphaerochaeta globosa glucosidase, Uniparc reference UPI0002010060, Uniprot reference F0RVK3.
[0362] Seq ID No. 245: Amino acid sequence for Sphaerochaeta coccoides glucosidase, Uniparc reference UPI000207D78C, Uniprot reference F4GH96.
[0363] Seq ID No. 246: Amino acid sequence for Novosphingobium sp. glucosidase, Uniparc reference UPI00020EFBCB, Uniprot reference F6ICQ5.
[0364] Seq ID No. 247: Amino acid sequence for Arthrobotrys oligospora glucosidase, Uniparc reference UPI000225331F, Uniprot reference G1XH86.
[0365] Seq ID No. 248: Amino acid sequence for Lactococcus lactis glucosidase, Uniparc reference UPI00000C6907, Uniprot reference G6FFS4.
[0366] Seq ID No. 249: Amino acid sequence for Phaeospirillum molischianum glucosidase, Uniparc reference UPI000255313A, Uniprot reference H8FXH7.
[0367] Seq ID No. 250: Amino acid sequence for Modestobacter marinus glucosidase, Uniparc reference UPI0002609C68, Uniprot reference I4EW72.
[0368] Seq ID No. 251: Amino acid sequence for Saccharothrix espanaensis glucosidase, Uniparc reference UPI00028AC337, Uniprot reference K0K125.
[0369] Seq ID No. 252: Amino acid sequence for Cronobacter sakazakii glucosidase, Uniparc reference UPI00029BA293, Uniprot reference K8DAK0.
[0370] Seq ID No. 253: Amino acid sequence for Verticillium alfalfae glucosidase, Uniparc reference UPI0001BBDF1E, Uniprot reference C9SVX1.
[0371] Seq ID No. 254: Amino acid sequence for Bacteroides xylanisolvens glucosidase, Uniparc reference UPI0001CCFD36, Uniprot reference D6CY10.
[0372] Seq ID No. 255: Amino acid sequence for Leadbetterella byssophila glucosidase, Uniparc reference UPI0001EBD98A, Uniprot reference E4RUR0.
[0373] Seq ID No. 256: Amino acid sequence for Sphaerochaeta globosa glucosidase, Uniparc reference UPI00020102A5, Uniprot reference F0RYB6.
[0374] Seq ID No. 257: Amino acid sequence for Sphaerochaeta coccoides glucosidase, Uniparc reference UPI000207D6A0, Uniprot reference F4GLH6.
[0375] Seq ID No. 258: Amino acid sequence for Haloplasma contractile glucosidase, Uniparc reference UPI000212252C, Uniprot reference F7Q0Y2.
[0376] Seq ID No. 259: Amino acid sequence for Nitrospirillum amazonense glucosidase, Uniparc reference UPI0002265447, Uniprot reference G1Y4C7.
[0377] Seq ID No. 260: Amino acid sequence for Azospirillum brasilense glucosidase, Uniparc reference UPI00023420B8, Uniprot reference G8AWD9.
[0378] Seq ID No. 261: Amino acid sequence for Phaeospirillum molischianum glucosidase, Uniparc reference UPI000255314F, Uniprot reference H8FXJ8.
[0379] Seq ID No. 262: Amino acid sequence for Modestobacter marinus glucosidase, Uniparc reference UPI000260A2FA, Uniprot reference I4EYD5.
[0380] Seq ID No. 263: Amino acid sequence for Wickerhamomyces ciferrii glucosidase, Uniparc reference UPI000283EB8D, Uniprot reference K0KVJ2.
[0381] Seq ID No. 264: Amino acid sequence for Gloeocapsa sp. glucosidase, Uniparc reference UPI0002A5D085, Uniprot reference K9XKL8.
[0382] Seq ID No. 265: Amino acid sequence for Sphaerobacter thermophilus glucosidase, Uniparc reference UPI0001A3BCB6, Uniprot reference D1C7U8.
[0383] Seq ID No. 266: Amino acid sequence for Bacteroides xylanisolvens glucosidase, Uniparc reference UPI0001CCEF1F, Uniprot reference D6D4V2.
[0384] Seq ID No. 267: Amino acid sequence for Prevotella buccae glucosidase, Uniparc reference UPI0001F149E8, Uniprot reference E6K4W5.
[0385] Seq ID No. 268: Amino acid sequence for Grosmannia clavigera glucosidase, Uniparc reference UPI0001FF1101, Uniprot reference F0XBR0.
[0386] Seq ID No. 269: Amino acid sequence for Melampsora larici-populina glucosidase, Uniparc reference UPI00020F9774, Uniprot reference F4R4W2.
[0387] Seq ID No. 270: Amino acid sequence for Prevotella multisaccharivorax glucosidase, Uniparc reference UPI0002138E9C, Uniprot reference F8N7G1.
[0388] Seq ID No. 271: Amino acid sequence for Streptomyces zinciresistens glucosidase, Uniparc reference UPI0002255A63, Uniprot reference G2G8K4.
[0389] Seq ID No. 272: Amino acid sequence for Granulicella mallensis glucosidase, Uniparc reference UPI0001D9FC40, Uniprot reference G8NY42.
[0390] Seq ID No. 273: Amino acid sequence for Gibberella zeae glucosidase, Uniparc reference UPI00021F1FEE, Uniprot reference I1RH94.
[0391] Seq ID No. 274: Amino acid sequence for Modestobacter marinus glucosidase, Uniparc reference UPI00026090A2, Uniprot reference I4EYK6.
[0392] Seq ID No. 275: Amino acid sequence for Lactobacillus equicursoris glucosidase, Uniparc reference UPI0002869F55, Uniprot reference K0NRS8.
[0393] Seq ID No. 276: Amino acid sequence for Colletotrichum fructicola glucosidase, Uniparc reference UPI0002A93280, Uniprot reference L2F9W0.
[0394] Seq ID No. 277: Amino acid sequence for Streptosporangium roseum glucosidase, Uniparc reference UPI0001BF8AF6, Uniprot reference D2B261.
[0395] Seq ID No. 278: Amino acid sequence for Listeria grayi glucosidase, Uniparc reference UPI00019F252A, Uniprot reference D7UX19.
[0396] Seq ID No. 279: Amino acid sequence for Enterococcus italicus glucosidase, Uniparc reference UPI0001F11EFF, Uniprot reference E6LF07.
[0397] Seq ID No. 280: Amino acid sequence for Fluviicola taffensis glucosidase, Uniparc reference UPI000203D9EA, Uniprot reference F2IIT6.
[0398] Seq ID No. 281: Amino acid sequence for Shigella flexneri glucosidase, Uniparc reference UPI00020CA641, Uniprot reference F5N4W9.
[0399] Seq ID No. 282: Amino acid sequence for Actinomyces sp. glucosidase, Uniparc reference UPI0002189080, Uniprot reference F9EFW5.
[0400] Seq ID No. 283: Amino acid sequence for Verticillium dahliae glucosidase, Uniparc reference UPI00022EBE5A, Uniprot reference G2X5V6.
[0401] Seq ID No. 284: Amino acid sequence for Actinoplanes sp. glucosidase, Uniparc reference UPI00023ED5A8, Uniprot reference G8S0M0.
[0402] Seq ID No. 285: Amino acid sequence for Gibberella zeae glucosidase, Uniparc reference UPI000023EA29, Uniprot reference I1S320.
[0403] Seq ID No. 286: Amino acid sequence for Auricularia subglabra glucosidase, Uniparc reference UPI00027CE685, Uniprot reference J0WV06.
[0404] Seq ID No. 287: Amino acid sequence for Nitratireductor indicus glucosidase, Uniparc reference UPI00028E86D6, Uniprot reference K2N268.
[0405] Seq ID No. 288: Amino acid sequence for Thermoclostridium stercorarium glucosidase, Uniparc reference UPI0002AD999E, Uniprot reference L7VH66.
[0406] Seq ID No. 289: Amino acid sequence for Geobacillus sp. glucosidase, Uniparc reference UPI0002AF2DE3, Uniprot reference L8A1S2.
[0407] Seq ID No. 290: Amino acid sequence for uncultured bacterium glucosidase, Uniparc reference UPI000327C3CC, Uniprot reference M9ZC55.
[0408] Seq ID No. 291: Amino acid sequence for Burkholderia ambifaria glucosidase, Uniparc reference UPI000059ACE1, Uniprot reference Q0BAK2.
[0409] Seq ID No. 292: Amino acid sequence for Aspergillus oryzae glucosidase, Uniparc reference UPI0000676B8D, Uniprot reference Q2UIR4.
[0410] Seq ID No. 293: Amino acid sequence for Yersinia pseudotuberculosis glucosidase, Uniparc reference UPI00004269B5, Uniprot reference Q66DJ0.
[0411] Seq ID No. 294: Amino acid sequence for Wallemia ichthyophaga glucosidase, Uniparc reference UPI000331CC98, Uniprot reference R9AF64.
[0412] Seq ID No. 295: Amino acid sequence for Glarea lozoyensis glucosidase, Uniparc reference UPI0003522404, Uniprot reference S3DIM6.
[0413] Seq ID No. 296: Amino acid sequence for Moniliophthora roreri glucosidase, Uniparc reference UPI0003BF753A, Uniprot reference V2YU31.
[0414] Seq ID No. 297: Amino acid sequence for Zhouia amylolytica glucosidase, Uniparc reference UPI0003DBCB4F, Uniprot reference W2ULL3.
[0415] Seq ID No. 298: Amino acid sequence for Fusarium oxysporum glucosidase, Uniparc reference UPI0003F362FF, Uniprot reference W9NQQ3.
[0416] Seq ID No. 299: Amino acid sequence for Flavobacterium johnsoniae glucosidase, Uniparc reference UPI00006EA168, Uniprot reference A5FAA5.
[0417] Seq ID No. 300: Amino acid sequence for Oryza sativa glucosidase, Uniparc reference UPI00002394F5, Uniprot reference Q75I93.
[0418] Seq ID No. 301: Amino acid sequence for Clostridium saccharoperbutylacetonicum glucosidase, Uniparc reference UPI0002B65681, Uniprot reference M1MCD1.
[0419] Seq ID No. 302: Amino acid sequence for Rhodococcus sp. glucosidase, Uniparc reference UPI0002D21DB1, Uniprot reference N1MBN6.
[0420] Seq ID No. 303: Amino acid sequence for Burkholderia ambifaria glucosidase, Uniparc reference UPI000059C0CD, Uniprot reference Q0BCV8.
[0421] Seq ID No. 304: Amino acid sequence for Xanthomonas campestris glucosidase, Uniparc reference UPI00005CE9E7, Uniprot reference Q3BVH7.
[0422] Seq ID No. 305: Amino acid sequence for Caulobacter vibrioides glucosidase, Uniparc reference UPI00000C7604, Uniprot reference Q9A6F8.
[0423] Seq ID No. 306: Amino acid sequence for Arcticibacter svalbardensis glucosidase, Uniparc reference UPI000338772A, Uniprot reference R9GRA7.
[0424] Seq ID No. 307: Amino acid sequence for Winogradskyella psychrotolerans glucosidase, Uniparc reference UPI00035A4604, Uniprot reference S7VQ28.
[0425] Seq ID No. 308: Amino acid sequence for Methyloglobulus morosus glucosidase, Uniparc reference UPI0003C4ED6A, Uniprot reference V5DXT8.
[0426] Seq ID No. 309: Amino acid sequence for Pestalotiopsis fici glucosidase, Uniparc reference UPI0003E05C04, Uniprot reference W3WV37.
[0427] Seq ID No. 310: Amino acid sequence for Capronia coronata glucosidase, Uniparc reference UPI000434E698, Uniprot reference W9YNR7.
[0428] Seq ID No. 311: Amino acid sequence for Aspergillus aculeatus glucosidase, Uniparc reference UPI00001268FD, Uniprot reference P48825.
[0429] Seq ID No. 312: Amino acid sequence for Thermotoga neapolitana glucosidase, Uniparc reference UPI0000DD5996, Uniprot reference Q0GC07.
[0430] Seq ID No. 313: Amino acid sequence for Clostridium saccharoperbutylacetonicum glucosidase, Uniparc reference UPI0002B666E8, Uniprot reference M1MJF4.
[0431] Seq ID No. 314: Amino acid sequence for Schizosaccharomyces pombe glucosidase, Uniparc reference UPI000006B001, Uniprot reference O74799.
[0432] Seq ID No. 315: Amino acid sequence for Phaeosphaeria nodorum glucosidase, Uniparc reference UPI000161BD2B, Uniprot reference Q0TXF6.
[0433] Seq ID No. 316: Amino acid sequence for Xylella fastidiosa Dixon glucosidase, Uniparc reference UPI00003806C8, Uniprot reference Q3RGJ3.
[0434] Seq ID No. 317: Amino acid sequence for Schizosaccharomyces pombe glucosidase, Uniparc reference UPI000006A330, Uniprot reference Q9P6J6.
[0435] Seq ID No. 318: Amino acid sequence for Arcticibacter svalbardensis glucosidase, Uniparc reference UPI000337E887, Uniprot reference R9GWD6.
[0436] Seq ID No. 319: Amino acid sequence for Colletotrichum gloeosporioides glucosidase, Uniparc reference UPI0003885717, Uniprot reference T0KJI7.
[0437] Seq ID No. 320: Amino acid sequence for uncultured bacterium glucosidase, Uniparc reference UPI0003C9E340, Uniprot reference V5R1E8.
[0438] Seq ID No. 321: Amino acid sequence for Xanthomonas arboricola glucosidase, Uniparc reference UPI0003E06A61, Uniprot reference W4S7I5.
[0439] Seq ID No. 322: Amino acid sequence for Fusarium oxysporum glucosidase, Uniparc reference UPI00021EC697, Uniprot reference X0A8X8.
[0440] Seq ID No. 323: Amino acid sequence for Paenibacillus polymyxa glucosidase, Uniparc reference UPI00001108D0, Uniprot reference P22073.
[0441] Seq ID No. 324: Amino acid sequence for Kluyveromyces marxianus glucosidase, Uniparc reference UPI0001BE5ADA, Uniprot reference D1GCC6.
[0442] Seq ID No. 325: Amino acid sequence for Ilumatobacter coccineus glucosidase, Uniparc reference UPI0002C04A25, Uniprot reference M5A594.
[0443] Seq ID No. 326: Amino acid sequence for Agrobacterium sp. glucosidase, Uniparc reference UPI0000126912, Uniprot reference P12614.
[0444] Seq ID No. 327: Amino acid sequence for Cytophaga hutchinsonii glucosidase, Uniparc reference UPI000038ECF7, Uniprot reference Q11P53.
[0445] Seq ID No. 328: Amino acid sequence for Thermobifida fusca glucosidase, Uniparc reference UPI00003C5CA4, Uniprot reference Q47PF5.
[0446] Seq ID No. 329: Amino acid sequence for Botryotinia fuckeliana glucosidase, Uniparc reference UPI0000069E5E, Uniprot reference Q9UVJ6.
[0447] Seq ID No. 330: Amino acid sequence for Agarivorans albus glucosidase, Uniparc reference UPI00033994D2, Uniprot reference R9PTK2.
[0448] Seq ID No. 331: Amino acid sequence for Enterococcus sp. glucosidase, Uniparc reference UPI00038B7639, Uniprot reference T0UDU2.
[0449] Seq ID No. 332: Amino acid sequence for Salinispira pacifica glucosidase, Uniparc reference UPI0003D8A7DC, Uniprot reference V5WKT4.
[0450] Seq ID No. 333: Amino acid sequence for Bacteroides xylanisolvens glucosidase, Uniparc reference UPI0003ECF15E, Uniprot reference W6P696.
[0451] Seq ID No. 334: Amino acid sequence for Fusarium oxysporum glucosidase, Uniparc reference UPI000430029A, Uniprot reference X0AB46.
[0452] Seq ID No. 335: Amino acid sequence for Thermotoga maritima glucosidase, Uniparc reference UPI0000126906, Uniprot reference Q08638B.
[0453] Seq ID No. 336: Amino acid sequence for Neotermes koshunensis glucosidase, Uniparc reference UPI0000083EA8, Uniprot reference Q8T0W7.
[0454] Seq ID No. 337: Amino acid sequence for Thanatephorus cucumeris glucosidase, Uniparc reference UPI0002BF34B3, Uniprot reference M5CHG9.
[0455] Seq ID No. 338: Amino acid sequence for Hungateiclostridium thermocellum glucosidase, Uniparc reference UPI000053581D, Uniprot reference P14002.
[0456] Seq ID No. 339: Amino acid sequence for Koribacter versatilis glucosidase, Uniparc reference UPI0000D76A70, Uniprot reference Q1IJ89.
[0457] Seq ID No. 340: Amino acid sequence for Neosartorya fumigata glucosidase, Uniparc reference UPI00005203D8, Uniprot reference Q4WLX5.
[0458] Seq ID No. 341: Amino acid sequence for Amycolatopsis vancoresmycina glucosidase, Uniparc reference UPI00032DB8C1, Uniprot reference R1FKF0.
[0459] Seq ID No. 342: Amino acid sequence for Gibberella fujikuroi glucosidase, Uniparc reference UPI0003519C76, Uniprot reference S0EKU1.
[0460] Seq ID No. 343: Amino acid sequence for Bifidobacterium longum glucosidase, Uniparc reference UPI000390F839, Uniprot reference T2I2H5.
[0461] Seq ID No. 344: Amino acid sequence for uncultured bacterium glucosidase, Uniparc reference UPI0003DFF0DA, Uniprot reference W0FLD1.
[0462] Seq ID No. 345: Amino acid sequence for Bacteroides xylanisolvens glucosidase, Uniparc reference UPI0002D3D994, Uniprot reference W6P9J9.
[0463] Seq ID No. 346: Amino acid sequence for Fusarium oxysporum glucosidase, Uniparc reference UPI00042F8016, Uniprot reference X0HA35.
[0464] Seq ID No. 347: Amino acid sequence for Sorghum bicolor glucosidase, Uniparc reference UPI00000A7F40, Uniprot reference Q41290.
[0465] Seq ID No. 348: Amino acid sequence for Clostridium cellulovorans glucosidase, Uniparc reference UPI000050B701, Uniprot reference Q53EH2.
[0466] Seq ID No. 349: Amino acid sequence for Dacryopinax primogenitus glucosidase, Uniparc reference UPI0002C29EAA, Uniprot reference M5G1U5.
[0467] Seq ID No. 350: Amino acid sequence for Rhizobium radiobacter glucosidase, Uniparc reference UPI0000126913, Uniprot reference P27034.
[0468] Seq ID No. 351: Amino acid sequence for Phanerochaete chrysosporium glucosidase, Uniparc reference UPI00006E0CC7, Uniprot reference Q25BW5A.
[0469] Seq ID No. 352: Amino acid sequence for Enterobacter agglomerans glucosidase, Uniparc reference UPI0000126905, Uniprot reference Q59437.
[0470] Seq ID No. 353: Amino acid sequence for Candidatus microthrix glucosidase, Uniparc reference UPI00033056C4, Uniprot reference R4YWU4.
[0471] Seq ID No. 354: Amino acid sequence for Chthonomonas calidirosea glucosidase, Uniparc reference UPI0003427F29, Uniprot reference S0ET37.
[0472] Seq ID No. 355: Amino acid sequence for Acholeplasma brassicae glucosidase, Uniparc reference UPI0003B04208, Uniprot reference U4KMR7.
[0473] Seq ID No. 356: Amino acid sequence for Chania multitudinisentens glucosidase, Uniparc reference UPI0003E13BD3, Uniprot reference W0LJ28.
[0474] Seq ID No. 357: Amino acid sequence for Gibberella moniliformis glucosidase, Uniparc reference UPI0003ECCF80, Uniprot reference W7MW98.
[0475] Seq ID No. 358: Amino acid sequence for Fusarium oxysporum glucosidase, Uniparc reference UPI0004305856, Uniprot reference X0I2U8.
[0476] Seq ID No. 359: Amino acid sequence for Phanerochaete chrysosporium glucosidase, Uniparc reference UPI00006E0CC7, Uniprot reference Q25BW5B.
[0477] Seq ID No. 360: Amino acid sequence for Secale cereale glucosidase, Uniparc reference UPI00000A7EFC, Uniprot reference Q9FYS3.
[0478] Seq ID No. 361: Amino acid sequence for Anoxybacillus gonensis glucosidase, Uniparc reference UPI0002C0273E, Uniprot reference M5QUM2.
[0479] Seq ID No. 362: Amino acid sequence for Thermotoga maritima glucosidase, Uniparc reference UPI0000126906, Uniprot reference Q08638A.
[0480] Seq ID No. 363: Amino acid sequence for Rhodospirillum rubrum glucosidase, Uniparc reference UPI00003C2ACC, Uniprot reference Q2RP51.
[0481] Seq ID No. 364: Amino acid sequence for Thermotoga neapolitana glucosidase, Uniparc reference UPI00000B9013, Uniprot reference Q60038.
[0482] Seq ID No. 365: Amino acid sequence for Candidatus microthrix glucosidase, Uniparc reference UPI00032F466E, Uniprot reference R4Z6M6.
[0483] Seq ID No. 366: Amino acid sequence for Ruminiclostridium cellobioparum glucosidase, Uniparc reference UPI00032874EC, Uniprot reference S0FPI8.
[0484] Seq ID No. 367: Amino acid sequence for Acholeplasma brassicae glucosidase, Uniparc reference UPI0003B0490C, Uniprot reference U4KMV4.
[0485] Seq ID No. 368: Amino acid sequence for Klebsiella pneumoniae glucosidase, Uniparc reference UPI0003DB6EFD, Uniprot reference W1BBP5.
[0486] Seq ID No. 369: Amino acid sequence for Enterobacter sp. glucosidase, Uniparc reference UPI0003ED0A8E, Uniprot reference W7P6Y1.
[0487] Seq ID No. 370: Amino acid sequence for Rhizoctonia solani glucosidase, Uniparc reference UPI00045BB507, Uniprot reference X8JI88.
[0488] Seq ID No. 371: Amino acid sequence for Homo sapiens glucosidase, Uniparc reference UPI0000072C73, Uniprot reference Q9H227.
[0489] Seq ID No. 372: Amino acid sequence for uncultured bacterium glucosidase, Uniparc reference UPI0000DD5304, Uniprot reference Q0GMU3.
[0490] Seq ID No. 373: Amino acid sequence for Thermoanaerobacter thermohydrosulfuricus glucosidase, Uniparc reference UPI0002CA9E4F, Uniprot reference M8CQD9.
[0491] Seq ID No. 374: Amino acid sequence for Stigmatella aurantiaca glucosidase, Uniparc reference UPI0000E297D8, Uniprot reference Q091M8.
[0492] Seq ID No. 375: Amino acid sequence for Burkholderia thailandensis glucosidase, Uniparc reference UPI00006676B1, Uniprot reference Q2T7C9.
[0493] Seq ID No. 376: Amino acid sequence for Yersinia pseudotuberculosis glucosidase, Uniparc reference UPI0000426E8F, Uniprot reference Q665S2.
[0494] Seq ID No. 377: Amino acid sequence for Togninia minima glucosidase, Uniparc reference UPI00032BF71F, Uniprot reference R8BQM8.
[0495] Seq ID No. 378: Amino acid sequence for Ophiostoma piceae glucosidase, Uniparc reference UPI00035213C2, Uniprot reference S3BVJ8.
[0496] Seq ID No. 379: Amino acid sequence for Pyronema omphalodes glucosidase, Uniparc reference UPI0003B117B7, Uniprot reference U4LIL3.
[0497] Seq ID No. 380: Amino acid sequence for Ogataea parapolymorpha glucosidase, Uniparc reference UPI0001F76D1F, Uniprot reference W1QIW0.
[0498] Seq ID No. 381: Amino acid sequence for Hymenobacter swuensis glucosidase, Uniparc reference UPI0003F2059F, Uniprot reference W8F6U0.
[0499] Seq ID No. 382: Amino acid sequence for Flavobacterium johnsoniae glucosidase, Uniparc reference UPI00006E8E1B, Uniprot reference A5FEF5.
[0500] Seq ID No. 383: Amino acid sequence for Paenibacillus polymyxa glucosidase, Uniparc reference UPI000012690B, Uniprot reference P22505.
[0501] Seq ID No. 384: Amino acid sequence for Oryza sativa glucosidase, Uniparc reference UPI000009D014, Uniprot reference Q8L7J2.
[0502] Seq ID No. 385: Amino acid sequence for Oryza sativa glucosidase, Uniparc reference UPI0000E580F2, Uniprot reference B8AVF0.
[0503] Seq ID No. 386: Amino acid sequence for Nannochloris glucosidase, Uniparc reference UPI000EA7F16F, Uniprot reference A0A452CSM4.
[0504] Seq ID No. 387: Amino acid sequence for Halothermothrix orenii glucosidase, Uniparc reference UPI00006AE508, Uniprot reference B8CYA8.
[0505] Seq ID No. 388: Amino acid sequence for Neurospora crassa glucosidase, Uniparc reference UPI000018B2B4, Uniprot reference Q7RWP2.
[0506] Seq ID No. 389: Amino acid sequence for Micrococcus antarcticus glucosidase, Uniparc reference UPI000192BB5F, Uniprot reference B9V8P5.
[0507] Seq ID No. 390: Amino acid sequence for Exiguobacterium antarcticum glucosidase, Uniparc reference UPI000285E79E, Uniprot reference K0A8J9.
[0508] Seq ID No. 391: Amino acid sequence for Thermus thermophilus glucosidase, Uniparc reference UPI00000BEB61, Uniprot reference Q9RA61.
[0509] Seq ID No. 392: Amino acid sequence for Trichoderma harzianum glucosidase, Uniparc reference UPI00078BF747, Uniprot reference A0A2T4AR08.
[0510] Seq ID No. 393: Amino acid sequence for Hypocrea jecorina glucosidase, Uniparc reference UPI000006AA61, Uniprot reference Q12715.
[0511] Seq ID No. 394: Amino acid sequence for Streptomyces sp. glucosidase, Uniparc reference UPI00000B411B, Uniprot reference Q59976.
[0512] Seq ID No. 395: Amino acid sequence for Streptococcus pyogenes glucosidase, Uniparc reference UPI00000C7E56, Uniprot reference Q99YP9.
[0513] Seq ID No. 396: Amino acid sequence for Trifolium repens glucosidase, Uniparc reference UPI000012691B, Uniprot reference P26205.
[0514] Seq ID No. 397: Amino acid sequence for Talaromyces emersonii glucosidase, Uniparc reference UPI000006C8FF, Uniprot reference Q8TGI8.
[0515] Seq ID No. 398: Amino acid sequence for Hungateiclostridium thermocellum glucosidase, Uniparc reference UPI0000126903, Uniprot reference P26208.
[0516] Seq ID No. 399: Amino acid sequence for Lactobacillus plantarum glucosidase, Uniparc reference UPI000219FE3E, Uniprot reference F9ULH8.
[0517] Seq ID No. 400: Amino acid sequence for Agrobacterium tumefaciens glucosidase, Uniparc reference UPI0003F2033A, Uniprot reference A0A2I4PGZ0.
[0518] Seq ID No. 401: Codon optimised DNA encoding 6×His Cyberlindnera fabianii glucosidase, Uniparc reference UPI00049B1A8C, Uniprot reference A0A061B3J2.
[0519] Seq ID No. 402: Codon optimised DNA encoding 6×His Flavobacterium gilvum glucosidase, Uniparc reference UPI0004E3EF7B, Uniprot reference A0A085EII0.
[0520] Seq ID No. 403: Codon optimised DNA encoding 6×His Algibacter lectus glucosidase, Uniparc reference UPI00050EE490, Uniprot reference A0A090X649.
[0521] Seq ID No. 404: Codon optimised DNA encoding 6×His Microbacterium azadirachtae glucosidase, Uniparc reference UPI0005ECB51E, Uniprot reference A0A0F0LB94.
[0522] Seq ID No. 405: Codon optimised DNA encoding 6×His Actinobacteria bacterium glucosidase, Uniparc reference UPI0006588DAD, Uniprot reference A0A0J0UT37.
[0523] Seq ID No. 406: Codon optimised DNA encoding 6×His Chloroflexi bacterium glucosidase, Uniparc reference UPI0007968552, Uniprot reference A0A136KWB3.
[0524] Seq ID No. 407: Codon optimised DNA encoding 6×His Komagataeibacter rhaeticus glucosidase, Uniparc reference UPI0002080410, Uniprot reference A0A181C809.
[0525] Seq ID No. 408: Codon optimised DNA encoding 6×His Bacteroides sp. glucosidase, Uniparc reference UPI0008211BFC, Uniprot reference A0A1C5WEL8.
[0526] Seq ID No. 409: Codon optimised DNA encoding 6×His Streptomyces rubrolavendulae glucosidase, Uniparc reference UPI00085A2BD0, Uniprot reference A0A1D8FZW3.
[0527] Seq ID No. 410: Codon optimised DNA encoding 6×His Clostridium roseum glucosidase, Uniparc reference UPI00098C60F6, Uniprot reference A0A1S8KYM5.
[0528] Seq ID No. 411: Codon optimised DNA encoding 6×His uncultured bacterium glucosidase, Uniparc reference UPI0009CE0D4C, Uniprot reference A0A1V5M6V6.
[0529] Seq ID No. 412: Codon optimised DNA encoding 6×His Firmicutes bacterium glucosidase, Uniparc reference UPI0009D4127D, Uniprot reference A0A1V6AN95.
[0530] Seq ID No. 413: Codon optimised DNA encoding 6×His Anthracocystis flocculosa glucosidase, Uniparc reference UPI00045601AB, Uniprot reference A0A061H1Z3.
[0531] Seq ID No. 414: Codon optimised DNA encoding 6×His Bifidobacterium boum glucosidase, Uniparc reference UPI0004FF77C7, Uniprot reference A0A086ZKU2.
[0532] Seq ID No. 415: Codon optimised DNA encoding 6×His Jejuia pallidilutea glucosidase, Uniparc reference UPI00051EDBDE, Uniprot reference A0A098LTR2.
[0533] Seq ID No. 416: Codon optimised DNA encoding 6×His Ceratocystis fimbriata glucosidase, Uniparc reference UPI00062105AB, Uniprot reference A0A0F8B2B0.
[0534] Seq ID No. 417: Codon optimised DNA encoding 6×His Actinobacteria bacterium glucosidase, Uniparc reference UPI0006583AB1, Uniprot reference A0A0J0UVW7.
[0535] Seq ID No. 418: Codon optimised DNA encoding 6×His Rhodococcus sp. glucosidase, Uniparc reference UPI0007AABFAD, Uniprot reference A0A143QAX3.
[0536] Seq ID No. 419: Codon optimised DNA encoding 6×His Valsa mali glucosidase, Uniparc reference UPI0007F2D02D, Uniprot reference A0A194VF47.
[0537] Seq ID No. 420: Codon optimised DNA encoding 6×His uncultured Bacteroides sp. glucosidase, Uniparc reference UPI000821004D, Uniprot reference A0A1C5WSI4.
[0538] Seq ID No. 421: Codon optimised DNA encoding 6×His Eisenbergiella tayi glucosidase, Uniparc reference UPI00084089B2, Uniprot reference A0A1E3ALT2.
[0539] Seq ID No. 422: Codon optimised DNA encoding 6×His Streptomyces sp. glucosidase, Uniparc reference UPI000978E914, Uniprot reference A0A1V2MY14.
[0540] Seq ID No. 423: Codon optimised DNA encoding 6×His Firmicutes bacterium glucosidase, Uniparc reference UPI0009CBF21C, Uniprot reference A0A1V5MH90.
[0541] Seq ID No. 424: Codon optimised DNA encoding 6×His Tenericutes bacterium glucosidase, Uniparc reference UPI0009D5B1F0, Uniprot reference A0A1V6BAK3.
[0542] Seq ID No. 425: Codon optimised DNA encoding 6×His Gluconobacter oxydans glucosidase, Uniparc reference UPI0004A87350, Uniprot reference A0A067Z479.
[0543] Seq ID No. 426: Codon optimised DNA encoding 6×His Bifidobacterium catenulatum glucosidase, Uniparc reference UPI00050787A2, Uniprot reference A0A087B8Q8.
[0544] Seq ID No. 427: Codon optimised DNA encoding 6×His Bionectria ochroleuca glucosidase, Uniparc reference UPI0005965863, Uniprot reference A0A0B7K538.
[0545] Seq ID No. 428: Codon optimised DNA encoding 6×His Parcubacteria sp. glucosidase, Uniparc reference UPI0006377CA4, Uniprot reference A0A0G0GD78.
[0546] Seq ID No. 429: Codon optimised DNA encoding 6×His Microbacterium ketosireducens glucosidase, Uniparc reference UPI0006228575, Uniprot reference A0A0M2H276.
[0547] Seq ID No. 430: Codon optimised DNA encoding 6×His Roseburia faecis glucosidase, Uniparc reference UPI0006C454B4, Uniprot reference A0A173R3W4.
[0548] Seq ID No. 431: Codon optimised DNA encoding 6×His Kwoniella dejecticola glucosidase, Uniparc reference UPI0007F1D695, Uniprot reference A0A1A6A050.
[0549] Seq ID No. 432: Codon optimised DNA encoding 6×His uncultured Clostridium sp. glucosidase, Uniparc reference UPI0008232A70, Uniprot reference A0A1C6C862.
[0550] Seq ID No. 433: Codon optimised DNA encoding 6×His Cyberlindnera jadinii glucosidase, Uniparc reference UPI000866CB30, Uniprot reference A0A1E4S2F8.
[0551] Seq ID No. 434: Codon optimised DNA encoding 6×His Bacteroidetes bacterium glucosidase, Uniparc reference UPI0009D3483D, Uniprot reference A0A1V5G4W6.
[0552] Seq ID No. 435: Codon optimised DNA encoding 6×His Verrucomicrobia bacterium glucosidase, Uniparc reference UPI0009CC9AEA, Uniprot reference A0A1V5Q4R4.
[0553] Seq ID No. 436: Codon optimised DNA encoding 6×His Bacteroidetes bacterium glucosidase, Uniparc reference UPI0009C6DE73, Uniprot reference A0A1V6BV25.
[0554] Seq ID No. 437: Codon optimised DNA encoding 6×His Lichtheimia ramosa glucosidase, Uniparc reference UPI0004E051A9, Uniprot reference A0A077WUK7.
[0555] Seq ID No. 438: Codon optimised DNA encoding 6×His Bifidobacterium mongoliense glucosidase, Uniparc reference UPI0005060F52, Uniprot reference A0A087BWT7.
[0556] Seq ID No. 439: Codon optimised DNA encoding 6×His Vibrio ishigakensis glucosidase, Uniparc reference UPI0005910ED9, Uniprot reference A0A0B8NZY1.
[0557] Seq ID No. 440: Codon optimised DNA encoding 6×His Phaeomoniella chlamydospora glucosidase, Uniparc reference UPI00063B706F, Uniprot reference A0A0G2HEV5.
[0558] Seq ID No. 441: Codon optimised DNA encoding 6×His Ardenticatena maritima glucosidase, Uniparc reference UPI0006C04F59, Uniprot reference A0A0M8K5H7.
[0559] Seq ID No. 442: Codon optimised DNA encoding 6×His Coprococcus comes glucosidase, Uniparc reference UPI000197E031, Uniprot reference A0A173WPC4.
[0560] Seq ID No. 443: Codon optimised DNA encoding 6×His Nocardioides dokdonensis glucosidase, Uniparc reference UPI0007DDBAB3, Uniprot reference A0A1A9GNJ0.
[0561] Seq ID No. 444: Codon optimised DNA encoding 6×His uncultured Clostridium sp. glucosidase, Uniparc reference UPI000822F7EB, Uniprot reference A0A1C6EBC1.
[0562] Seq ID No. 445: Codon optimised DNA encoding 6×His Acetobacterium wieringae glucosidase, Uniparc reference UPI000878EB40, Uniprot reference A0A1F2PFB4.
[0563] Seq ID No. 446: Codon optimised DNA encoding 6×His Tenericutes bacterium glucosidase, Uniparc reference UPI0009D0A2C1, Uniprot reference A0A1V5HNJ3.
[0564] Seq ID No. 447: Codon optimised DNA encoding 6×His Tenericutes bacterium glucosidase, Uniparc reference UPI0009CB8A73, Uniprot reference A0A1V5UFI1.
[0565] Seq ID No. 448: Codon optimised DNA encoding 6×His uncultured bacterium glucosidase, Uniparc reference UPI0009CC90AF, Uniprot reference A0A1V6CDT2.
[0566] Seq ID No. 449: Codon optimised DNA encoding 6×His Parabacteroides distasonis glucosidase, Uniparc reference UPI0004D8E473, Uniprot reference A0A078SYD0.
[0567] Seq ID No. 450: Codon optimised DNA encoding 6×His Bifidobacterium psychraerophilum glucosidase, Uniparc reference UPI0005006C6A, Uniprot reference A0A087CJB0.
[0568] Seq ID No. 451: Codon optimised DNA encoding 6×His Hebeloma cylindrosporum glucosidase, Uniparc reference UPI00059A3BA8, Uniprot reference A0A0C2YJF2.
[0569] Seq ID No. 452: Codon optimised DNA encoding 6×His Brenneria goodwinii glucosidase, Uniparc reference UPI0006579FEA, Uniprot reference A0A0G4JRR8.
[0570] Seq ID No. 453: Codon optimised DNA encoding 6×His Aspergillus calidoustus glucosidase, Uniparc reference UPI00073C9E60, Uniprot reference A0A0U5GN20.
[0571] Seq ID No. 454: Codon optimised DNA encoding 6×His Bacteroides finegoldii glucosidase, Uniparc reference UPI0006C6E0C3, Uniprot reference A0A174BEZ2.
[0572] Seq ID No. 455: Codon optimised DNA encoding 6×His Altererythrobacter dongtanensis glucosidase, Uniparc reference UPI0008153D6D, Uniprot reference A0A1B2A943.
[0573] Seq ID No. 456: Codon optimised DNA encoding 6×His uncultured Anaerotruncus sp. glucosidase, Uniparc reference UPI0008206E7B, Uniprot reference A0A1C6FWD9.
[0574] Seq ID No. 457: Codon optimised DNA encoding 6×His Candidatus firestone glucosidase, Uniparc reference UPI0008AC0E17, Uniprot reference A0A1F5UJR6.
[0575] Seq ID No. 458: Codon optimised DNA encoding 6×His Tenericutes bacterium glucosidase, Uniparc reference UPI0009C6C8E4, Uniprot reference A0A1V5HS22.
[0576] Seq ID No. 459: Codon optimised DNA encoding 6×His Lentisphaerae bacterium glucosidase, Uniparc reference UPI0009CEE1AB, Uniprot reference A0A1V5VBL2.
[0577] Seq ID No. 460: Codon optimised DNA encoding 6×His Planctomycetes bacterium glucosidase, Uniparc reference UPI0009CAAB0A, Uniprot reference A0A1V6FZ47.
[0578] Seq ID No. 461: Codon optimised DNA encoding 6×His Pseudallescheria apiosperma glucosidase, Uniparc reference UPI0004DD62AC, Uniprot reference A0A084G332.
[0579] Seq ID No. 462: Codon optimised DNA encoding 6×His Nonlabens sediminis glucosidase, Uniparc reference UPI000507F00A, Uniprot reference A0A090Q4N8.
[0580] Seq ID No. 463: Codon optimised DNA encoding 6×His Gynuella sunshinyii glucosidase, Uniparc reference UPI0005CC42CA, Uniprot reference A0A0C5VDU3.
[0581] Seq ID No. 464: Codon optimised DNA encoding 6×His Verticillium longisporum glucosidase, Uniparc reference UPI00063E4005, Uniprot reference A0A0G4N9Q7.
[0582] Seq ID No. 465: Codon optimised DNA encoding 6×His Cellulomonas sp. glucosidase, Uniparc reference UPI00073C6CD3, Uniprot reference A0A0V8TAB5.
[0583] Seq ID No. 466: Codon optimised DNA encoding 6×His Hungatella hathewayi glucosidase, Uniparc reference UPI0006C024BB, Uniprot reference A0A174FBX7.
[0584] Seq ID No. 467: Codon optimised DNA encoding 6×His Mesorhizobium sp. glucosidase, Uniparc reference UPI000688E74D, Uniprot reference A0A1C2DG64.
[0585] Seq ID No. 468: Codon optimised DNA encoding 6×His Clostridium sp. glucosidase, Uniparc reference UPI000822FAB7, Uniprot reference A0A1C6GRT5.
[0586] Seq ID No. 469: Codon optimised DNA encoding 6×His Chlamydiales bacterium glucosidase, Uniparc reference UPI0009284E74, Uniprot reference A0A1M3CSY6.
[0587] Seq ID No. 470: Codon optimised DNA encoding 6×His Spirochaetes bacterium glucosidase, Uniparc reference UPI0009CB461D, Uniprot reference A0A1V5HUX3.
[0588] Seq ID No. 471: Codon optimised DNA encoding 6×His bacterium glucosidase, Uniparc reference UPI0009C92D6A, Uniprot reference A0A1V5VHB9.
[0589] Seq ID No. 472: Codon optimised DNA encoding 6×His Thermotogae bacterium glucosidase, Uniparc reference UPI0009D12B86, Uniprot reference A0A1V6H2W5.
[0590] Seq ID No. 473: Codon optimised DNA encoding 6×His Pseudallescheria apiosperma glucosidase, Uniparc reference UPI0004DCBED3, Uniprot reference A0A084GGE2.
[0591] Seq ID No. 474: Codon optimised DNA encoding 6×His Algibacter lectus glucosidase, Uniparc reference UPI00050E0BE3, Uniprot reference A0A090VF17.
[0592] Seq ID No. 475: Codon optimised DNA encoding 6×His Paxillus involutus glucosidase, Uniparc reference UPI0005B075C8, Uniprot reference A0A0C9TWP5.
[0593] Seq ID No. 476: Codon optimised DNA encoding 6×His Verticillium longisporum glucosidase, Uniparc reference UPI00063DF006, Uniprot reference A0A0G4NA55.
[0594] Seq ID No. 477: Codon optimised DNA encoding 6×His Mucilaginibacter gotjawali glucosidase, Uniparc reference UPI00076F8EA4, Uniprot reference A0A110B1H1.
[0595] Seq ID No. 478: Codon optimised DNA encoding 6×His Bacteroides uniformis glucosidase, Uniparc reference UPI0006C0FFEF, Uniprot reference A0A174IWW4.
[0596] Seq ID No. 479: Codon optimised DNA encoding 6×His Coprococcus sp. glucosidase, Uniparc reference UPI0008222B77, Uniprot reference A0A1C5W0N6.
[0597] Seq ID No. 480: Codon optimised DNA encoding 6×His Blautia sp. glucosidase, Uniparc reference UPI0006C36823, Uniprot reference A0A1C6K2X5.
[0598] Seq ID No. 481: Codon optimised DNA encoding 6×His Cellulomonas sp. glucosidase, Uniparc reference UPI00092B3CD4, Uniprot reference A0A1M3ELH4.
[0599] Seq ID No. 482: Codon optimised DNA encoding 6×His bacterium glucosidase, Uniparc reference UPI0009C85428, Uniprot reference A0A1V5J984.
[0600] Seq ID No. 483: Codon optimised DNA encoding 6×His Spirochaetes bacterium glucosidase, Uniparc reference UPI0009CA1D5C, Uniprot reference A0A1V5WHQ7.
[0601] Seq ID No. 484: Codon optimised DNA encoding 6×His Tenericutes bacterium glucosidase, Uniparc reference UPI0009C7041F, Uniprot reference A0A1V6IJ57.
[0602] Seq ID No. 485: Codon optimised DNA encoding 6×His Flavobacterium gilvum glucosidase, Uniparc reference UPI0004E2A41F, Uniprot reference A0A085EG29.
[0603] Seq ID No. 486: Codon optimised DNA encoding 6×His Algibacter lectus glucosidase, Uniparc reference UPI0005102470, Uniprot reference A0A090WWZ1.
[0604] Seq ID No. 487: Codon optimised DNA encoding 6×His Hydnomerulius pinastri glucosidase, Uniparc reference UPI0005B0F0AE, Uniprot reference A0A0C9WDY0.
[0605] Seq ID No. 488: Codon optimised DNA encoding 6×His Nocardia farcinica glucosidase, Uniparc reference UPI00065C2666, Uniprot reference A0A0H5NWN2.
[0606] Seq ID No. 489: Codon optimised DNA encoding 6×His Bacteroides cellulosilyticus glucosidase, Uniparc reference UPI000760375B, Uniprot reference A0A125MG18.
[0607] Seq ID No. 490: Codon optimised DNA encoding 6×His Fonsecaea erecta glucosidase, Uniparc reference UPI0007DF4250, Uniprot reference A0A178ZBN2.
[0608] Seq ID No. 491: Codon optimised DNA encoding 6×His Bacteroides sp. glucosidase, Uniparc reference UPI0008209852, Uniprot reference A0A1C5W9N9.
[0609] Seq ID No. 492: Codon optimised DNA encoding 6×His Tannerella forsythia glucosidase, Uniparc reference UPI00086C34C1, Uniprot reference A0A1D3UGH8.
[0610] Seq ID No. 493: Codon optimised DNA encoding 6×His Microbacterium esteraromaticum glucosidase, Uniparc reference UPI00097E83BB, Uniprot reference A0A1R4KI92.
[0611] Seq ID No. 494: Codon optimised DNA encoding 6×His bacterium glucosidase, Uniparc reference UPI0009D255E5, Uniprot reference A0A1V5LJK9.
[0612] Seq ID No. 495: Codon optimised DNA encoding 6×His Candidatus hydrogenedentes glucosidase, Uniparc reference UPI0009C5A3CF, Uniprot reference A0A1V5Z2L2.
[0613] Seq ID No. 496: Codon optimised DNA encoding 6×His Bacteroidetes bacterium glucosidase, Uniparc reference UPI0009C55799, Uniprot reference A0A1V6J4J8.
[0614] Seq ID No. 497: Codon optimised DNA encoding 6×His Penicillium solitum glucosidase, Uniparc reference UPI0009D4067F, Uniprot reference A0A1V6RQ41.
[0615] Seq ID No. 498: Codon optimised DNA encoding 6×His Weissella soli glucosidase, Uniparc reference UPI0008737AA2, Uniprot reference A0A288Q8I2.
[0616] Seq ID No. 499: Codon optimised DNA encoding 6×His Acetatifactor muris glucosidase, Uniparc reference UPI000CAC57D4, Uniprot reference A0A2K4ZN91.
[0617] Seq ID No. 500: Codon optimised DNA encoding 6×His Corynespora cassiicola glucosidase, Uniparc reference UPI000D237A4A, Uniprot reference A0A2T2NYD4.
[0618] Seq ID No. 501: Codon optimised DNA encoding 6×His Meira miltonrushii glucosidase, Uniparc reference UPI000D77C91D, Uniprot reference A0A316V6M3.
[0619] Seq ID No. 502: Codon optimised DNA encoding 6×His Bacteroides fragilis glucosidase, Uniparc reference UPI00004E1F76, Uniprot reference A0A380YVC7.
[0620] Seq ID No. 503: Codon optimised DNA encoding 6×His Malassezia restricta glucosidase, Uniparc reference UPI000F0C30E8, Uniprot reference A0A3G2SB79.
[0621] Seq ID No. 504: Codon optimised DNA encoding 6×His Fusarium euwallaceae glucosidase, Uniparc reference UPI000FFFEFB2, Uniprot reference A0A430LYA2.
[0622] Seq ID No. 505: Codon optimised DNA encoding 6×His Psathyrella aberdarensis glucosidase, Uniparc reference UPI0010251887, Uniprot reference A0A4Q2E070.
[0623] Seq ID No. 506: Codon optimised DNA encoding 6×His Aeromonas hydrophila glucosidase, Uniparc reference UPI0000E69509, Uniprot reference A0KLP6.
[0624] Seq ID No. 507: Codon optimised DNA encoding 6×His Saccharopolyspora erythraea glucosidase, Uniparc reference UPI00000B86CB, Uniprot reference A4F7P9.
[0625] Seq ID No. 508: Codon optimised DNA encoding 6×His Streptomyces sviceus glucosidase, Uniparc reference UPI000180240E, Uniprot reference B5I181.
[0626] Seq ID No. 509: Codon optimised DNA encoding 6×His Naematelia encephala glucosidase, Uniparc reference UPI000A250F78, Uniprot reference A0A1Y2AWB7.
[0627] Seq ID No. 510: Codon optimised DNA encoding 6×His Hartmannibacter diazotrophicus glucosidase, Uniparc reference UPI000C0221F1, Uniprot reference A0A2C9D6I2.
[0628] Seq ID No. 511: Codon optimised DNA encoding 6×His Pontimonas salivibrio glucosidase, Uniparc reference UPI000CEB5AB1, Uniprot reference A0A2L2BPE2.
[0629] Seq ID No. 512: Codon optimised DNA encoding 6×His Cadophora sp. glucosidase, Uniparc reference UPI000D5B9C38, Uniprot reference A0A2V1CH24.
[0630] Seq ID No. 513: Codon optimised DNA encoding 6×His Meira miltonrushii glucosidase, Uniparc reference UPI000D779558, Uniprot reference A0A316V8S0.
[0631] Seq ID No. 514: Codon optimised DNA encoding 6×His Monilinia fructigena glucosidase, Uniparc reference UPI000DC42E3D, Uniprot reference A0A395IJW4.
[0632] Seq ID No. 515: Codon optimised DNA encoding 6×His Hortaea werneckii glucosidase, Uniparc reference UPI000F3E476C, Uniprot reference A0A3M6XGS0.
[0633] Seq ID No. 516: Codon optimised DNA encoding 6×His Streptomyces netropsis glucosidase, Uniparc reference UPI00101460D7, Uniprot reference A0A445N7U0.
[0634] Seq ID No. 517: Codon optimised DNA encoding 6×His Aureobasidium pullulans glucosidase, Uniparc reference UPI001139C6A8, Uniprot reference A0A4S9IFI0.
[0635] Seq ID No. 518: Codon optimised DNA encoding 6×His Aspergillus clavatus glucosidase, Uniparc reference UPI0000EA5CFF, Uniprot reference A1CTN9.
[0636] Seq ID No. 519: Codon optimised DNA encoding 6×His Clavibacter michiganensis glucosidase, Uniparc reference UPI0001523037, Uniprot reference A5CT94.
[0637] Seq ID No. 520: Codon optimised DNA encoding 6×His Penicillium rubens glucosidase, Uniparc reference UPI0001831CF5, Uniprot reference B6H7R5.
[0638] Seq ID No. 521: Codon optimised DNA encoding 6×His Lachnoclostridium sp. glucosidase, Uniparc reference UPI000B365547, Uniprot reference A0A1Y4NTL9.
[0639] Seq ID No. 522: Codon optimised DNA encoding 6×His Rhodobacteraceae bacterium glucosidase, Uniparc reference UPI000C09BF88, Uniprot reference A0A2D5IXB9.
[0640] Seq ID No. 523: Codon optimised DNA encoding 6×His Bacteroides fragilis glucosidase, Uniparc reference UPI0004B5EEF2, Uniprot reference A0A2M9UUC4.
[0641] Seq ID No. 524: Codon optimised DNA encoding 6×His Aspergillus indologenus glucosidase, Uniparc reference UPI000D7FE1ED, Uniprot reference A0A2V5IY78.
[0642] Seq ID No. 525: Codon optimised DNA encoding 6×His Acaromyces ingoldii glucosidase, Uniparc reference UPI000D802B25, Uniprot reference A0A316YR39.
[0643] Seq ID No. 526: Codon optimised DNA encoding 6×His Monilinia fructigena glucosidase, Uniparc reference UPI000DC60823, Uniprot reference A0A395J1U5.
[0644] Seq ID No. 527: Codon optimised DNA encoding 6×His Paenibacillus xylanexedens glucosidase, Uniparc reference UPI000F52D773, Uniprot reference A0A3N6CA02.
[0645] Seq ID No. 528: Codon optimised DNA encoding 6×His Actinomyces howellii glucosidase, Uniparc reference UPI000F6DAAAE, Uniprot reference A0A448HIG0.
[0646] Seq ID No. 529: Codon optimised DNA encoding 6×His Friedmanniomyces endolithicus glucosidase, Uniparc reference UPI00113D19DF, Uniprot reference A0A4V5N9I4.
[0647] Seq ID No. 530: Codon optimised DNA encoding 6×His Neosartorya fischeri glucosidase, Uniparc reference UPI0000EA8672, Uniprot reference A1DNS0.
[0648] Seq ID No. 531: Codon optimised DNA encoding 6×His Pseudomonas aeruginosa glucosidase, Uniparc reference UPI0000D7314B, Uniprot reference A6V4K6.
[0649] Seq ID No. 532: Codon optimised DNA encoding 6×His Talaromyces stipitatus glucosidase, Uniparc reference UPI00018E7266, Uniprot reference B8MF24.
[0650] Seq ID No. 533: Codon optimised DNA encoding 6×His Aquimixticola soesokkakensis glucosidase, Uniparc reference UPI000A1A5FD7, Uniprot reference A0A1Y5RVF8.
[0651] Seq ID No. 534: Codon optimised DNA encoding 6×His Rhodobacterales bacterium glucosidase, Uniparc reference UPI000C98D37C, Uniprot reference A0A2D9YGV1.
[0652] Seq ID No. 535: Codon optimised DNA encoding 6×His Methylorubrum extorquens glucosidase, Uniparc reference UPI0006F9793E, Uniprot reference A0A2N9AS40.
[0653] Seq ID No. 536: Codon optimised DNA encoding 6×His Clostridium perfringens glucosidase, Uniparc reference UPI00000CF7C8, Uniprot reference A0A2X2YBP0.
[0654] Seq ID No. 537: Codon optimised DNA encoding 6×His Acholeplasmatales bacterium glucosidase, Uniparc reference UPI0008AEBEA3, Uniprot reference A0A348NID6.
[0655] Seq ID No. 538: Codon optimised DNA encoding 6×His Bacteroidetes bacterium glucosidase, Uniparc reference UPI000EC3C979, Uniprot reference A0A3B8VHE8.
[0656] Seq ID No. 539: Codon optimised DNA encoding 6×His Clostridium carnis glucosidase, Uniparc reference UPI000F637E38, Uniprot reference A0A3P6K8E8.
[0657] Seq ID No. 540: Codon optimised DNA encoding 6×His Mycolicibacterium flavescens glucosidase, Uniparc reference UPI000B93B5C9, Uniprot reference A0A448HNB5.
[0658] Seq ID No. 541: Codon optimised DNA encoding 6×His Streptococcus gallolyticus glucosidase, Uniparc reference UPI000F6EFA71, Uniprot reference A0A4V6LJ94.
[0659] Seq ID No. 542: Codon optimised DNA encoding 6×His Yersinia enterocolitica glucosidase, Uniparc reference UPI0000EB54CC, Uniprot reference A1JNB7.
[0660] Seq ID No. 543: Codon optimised DNA encoding 6×His Anaeromyxobacter sp. glucosidase, Uniparc reference UPI0000ED8A80, Uniprot reference A7HFG4.
[0661] Seq ID No. 544: Codon optimised DNA encoding 6×His Talaromyces stipitatus glucosidase, Uniparc reference UPI00018E7D70, Uniprot reference B8MK55.
[0662] Seq ID No. 545: Codon optimised DNA encoding 6×His Hortaea werneckii glucosidase, Uniparc reference UPI000A2E3FAA, Uniprot reference A0A1Z5SL14.
[0663] Seq ID No. 546: Codon optimised DNA encoding 6×His Micavibrio sp. glucosidase, Uniparc reference UPI000C529025, Uniprot reference A0A2E2Q8X2.
[0664] Seq ID No. 547: Codon optimised DNA encoding 6×His Acidobacteriia bacterium glucosidase, Uniparc reference UPI000CE6B996, Uniprot reference A0A2N9MBS0.
[0665] Seq ID No. 548: Codon optimised DNA encoding 6×His Corynebacterium jeikeium glucosidase, Uniparc reference UPI000DA3A972, Uniprot reference A0A2X4T570.
[0666] Seq ID No. 549: Codon optimised DNA encoding 6×His Clostridiaceae bacterium glucosidase, Uniparc reference UPI000E8D37A1, Uniprot reference A0A353PZH8.
[0667] Seq ID No. 550: Codon optimised DNA encoding 6×His Anaerolineaceae bacterium glucosidase, Uniparc reference UPI000748C096, Uniprot reference A0A3B9PA35.
[0668] Seq ID No. 551: Codon optimised DNA encoding 6×His Gymnopilus dilepis glucosidase, Uniparc reference UPI000FF41956, Uniprot reference A0A409WSY0.
[0669] Seq ID No. 552: Codon optimised DNA encoding 6×His Kocuria rosea glucosidase, Uniparc reference UPI000F7105D4, Uniprot reference A0A448R8N0.
[0670] Seq ID No. 553: Codon optimised DNA encoding 6×His Teredinibacter sp. glucosidase, Uniparc reference UPI0011696FAB, Uniprot reference A0A509DWZ3.
[0671] Seq ID No. 554: Codon optimised DNA encoding 6×His Aspergillus niger glucosidase, Uniparc reference UPI0000EFB564, Uniprot reference A2QS42.
[0672] Seq ID No. 555: Codon optimised DNA encoding 6×His Laccaria bicolor glucosidase, Uniparc reference UPI000164423D, Uniprot reference B0D734.
[0673] Seq ID No. 556: Codon optimised DNA encoding 6×His Podosphaera parvula glucosidase, Uniparc reference UPI00017357F6, Uniprot reference B9XH33.
[0674] Seq ID No. 557: Codon optimised DNA encoding 6×His Megamonas hypermegale glucosidase, Uniparc reference UPI00042469F6, Uniprot reference A0A239TGH2.
[0675] Seq ID No. 558: Codon optimised DNA encoding 6×His Armillaria gallica glucosidase, Uniparc reference UPI000BC209C3, Uniprot reference A0A2H3E300.
[0676] Seq ID No. 559: Codon optimised DNA encoding 6×His Micromonospora sp. glucosidase, Uniparc reference UPI000D2EAE87, Uniprot reference A0A2P8AV03.
[0677] Seq ID No. 560: Codon optimised DNA encoding 6×His Klebsiella oxytoca glucosidase, Uniparc reference UPI000DA286EE, Uniprot reference A0A2X5CJC5.
[0678] Seq ID No. 561: Codon optimised DNA encoding 6×His Candidatus ozemobacter glucosidase, Uniparc reference UPI000DFAEF6C, Uniprot reference A0A367ZIH8.
[0679] Seq ID No. 562: Codon optimised DNA encoding 6×His Coleophoma crateriformis glucosidase, Uniparc reference UPI000E399EE8, Uniprot reference A0A3D8R2C2.
[0680] Seq ID No. 563: Codon optimised DNA encoding 6×His Apiotrichum porosum glucosidase, Uniparc reference UPI000FBC01E3, Uniprot reference A0A427XHS2.
[0681] Seq ID No. 564: Codon optimised DNA encoding 6×His Acholeplasma hippikon glucosidase, Uniparc reference UPI00068E4E50, Uniprot reference A0A449BJ27.
[0682] Seq ID No. 565: Codon optimised DNA encoding 6×His Streptomyces spectabilis glucosidase, Uniparc reference UPI001185F074, Uniprot reference A0A516RGT1.
[0683] Seq ID No. 566: Codon optimised DNA encoding 6×His Aspergillus niger glucosidase, Uniparc reference UPI0000EFCED2, Uniprot reference A2R8G2.
[0684] Seq ID No. 567: Codon optimised DNA encoding 6×His Xanthomonas campestris glucosidase, Uniparc reference UPI00000D8BFA, Uniprot reference B0RYA0.
[0685] Seq ID No. 568: Codon optimised DNA encoding 6×His Lactobacillus paracasei glucosidase, Uniparc reference UPI00019C9CD7, Uniprot reference C2FDL2.
[0686] Seq ID No. 569: Codon optimised DNA encoding 6×His Bifiguratus adelaidae glucosidase, Uniparc reference UPI000BC490A3, Uniprot reference A0A261XUH4.
[0687] Seq ID No. 570: Codon optimised DNA encoding 6×His bacterium glucosidase, Uniparc reference UPI000CC31AE2, Uniprot reference A0A2H5YYA1.
[0688] Seq ID No. 571: Codon optimised DNA encoding 6×His Actinomadura parvosata glucosidase, Uniparc reference UPI000D26C9C6, Uniprot reference A0A2P9IY35.
[0689] Seq ID No. 572: Codon optimised DNA encoding 6×His Melissococcus plutonius glucosidase, Uniparc reference UPI00024F22B8, Uniprot reference A0A2Z5Y4P3.
[0690] Seq ID No. 573: Codon optimised DNA encoding 6×His Enterococcus durans glucosidase, Uniparc reference UPI000E020871, Uniprot reference A0A377KJS3.
[0691] Seq ID No. 574: Codon optimised DNA encoding 6×His Malassezia restricta glucosidase, Uniparc reference UPI000DD17A7D, Uniprot reference A0A3G2S2J6.
[0692] Seq ID No. 575: Codon optimised DNA encoding 6×His Apiotrichum porosum glucosidase, Uniparc reference UPI000FA2DE87, Uniprot reference A0A427XZQ0.
[0693] Seq ID No. 576: Codon optimised DNA encoding 6×His Streptomonospora sp. glucosidase, Uniparc reference UPI0010355193, Uniprot reference A0A4P6PWP5.
[0694] Seq ID No. 577: Codon optimised DNA encoding 6×His Lactobacillus gasseri glucosidase, Uniparc reference UPI00119640A1, Uniprot reference A0A558LH47.
[0695] Seq ID No. 578: Codon optimised DNA encoding 6×His Aspergillus niger glucosidase, Uniparc reference UPI0000EFD0AA, Uniprot reference A2RAJ1.
[0696] Seq ID No. 579: Codon optimised DNA encoding 6×His Neosartorya fumigata glucosidase, Uniparc reference UPI000170BF91, Uniprot reference B0XXG1.
[0697] Seq ID No. 580: Codon optimised DNA encoding 6×His Eubacterium eligens glucosidase, Uniparc reference UPI0001A5B234, Uniprot reference C4Z6T5.
[0698] Seq ID No. 581: Codon optimised DNA encoding 6×His Bifiguratus adelaidae glucosidase, Uniparc reference UPI000BC64A75, Uniprot reference A0A261XVM8.
[0699] Seq ID No. 582: Codon optimised DNA encoding 6×His bacterium glucosidase, Uniparc reference UPI000CAA854E, Uniprot reference A0A2H6EX57.
[0700] Seq ID No. 583: Codon optimised DNA encoding 6×His Corynespora cassiicola glucosidase, Uniparc reference UPI000D24EC2C, Uniprot reference A0A2T2N5H9.
[0701] Seq ID No. 584: Codon optimised DNA encoding 6×His Pseudomicrostroma glucosiphilum glucosidase, Uniparc reference UPI000D77A0B7, Uniprot reference A0A316UK83.
[0702] Seq ID No. 585: Codon optimised DNA encoding 6×His Staphylococcus saprophyticus glucosidase, Uniparc reference UPI0002DAAFCC, Uniprot reference A0A380HD31.
[0703] Seq ID No. 586: Codon optimised DNA encoding 6×His Malassezia restricta glucosidase, Uniparc reference UPI000F0C6B8E, Uniprot reference A0A3G2S932.
[0704] Seq ID No. 587: Codon optimised DNA encoding 6×His Saitozyma podzolica glucosidase, Uniparc reference UPI000FBA70E2, Uniprot reference A0A427YCL1.
[0705] Seq ID No. 588: Codon optimised DNA encoding 6×His Tremella mesenterica glucosidase, Uniparc reference UPI00102822B4, Uniprot reference A0A4Q1BRC6.
[0706] Seq ID No. 589: Codon optimised DNA encoding 6×His Arthrobacter sp. glucosidase, Uniparc reference UPI0000527506, Uniprot reference A0JZ86.
[0707] Seq ID No. 590: Codon optimised DNA encoding 6×His Scheffersomyces stipitis glucosidase, Uniparc reference UPI000157388C, Uniprot reference A3LRB0.
[0708] Seq ID No. 591: Codon optimised DNA encoding 6×His Leptothrix cholodnii glucosidase, Uniparc reference UPI0001712E02, Uniprot reference B1XZK8.
[0709] Seq ID No. 592: Codon optimised DNA encoding 6×His Thauera sp. glucosidase, Uniparc reference UPI000166883C, Uniprot reference C4ZLL7.
[0710] Seq ID No. 593: Codon optimised DNA encoding 6×His Kosmotoga olearia glucosidase, Uniparc reference UPI00018494AB, Uniprot reference C5CDW5.
[0711] Seq ID No. 594: Codon optimised DNA encoding 6×His Roseburia intestinalis glucosidase, Uniparc reference UPI0001CD671F, Uniprot reference D4L3Y2.
[0712] Seq ID No. 595: Codon optimised DNA encoding 6×His Streptococcus equinus glucosidase, Uniparc reference UPI0001E0DC00, Uniprot reference E0PDF8.
[0713] Seq ID No. 596: Codon optimised DNA encoding 6×His Streptococcus cristatus glucosidase, Uniparc reference UPI0001F80C4B, Uniprot reference E8JUK5.
[0714] Seq ID No. 597: Codon optimised DNA encoding 6×His Cellulosilyticum lentocellum glucosidase, Uniparc reference UPI0001D2DBBC, Uniprot reference F2JLH3.
[0715] Seq ID No. 598: Codon optimised DNA encoding 6×His Streptococcus gallolyticus glucosidase, Uniparc reference UPI0001C48657, Uniprot reference F5WYI5.
[0716] Seq ID No. 599: Codon optimised DNA encoding 6×His Ketogulonicigenium vulgare glucosidase, Uniparc reference UPI00021D443A, Uniprot reference F9Y8Z7.
[0717] Seq ID No. 600: Codon optimised DNA encoding 6×His Spathaspora passalidarum glucosidase, Uniparc reference UPI000228255D, Uniprot reference G3AGX1.
[0718] Seq ID No. 601: Codon optimised DNA encoding 6×His Niastella koreensis glucosidase, Uniparc reference UPI00023F6F5F, Uniprot reference G8T9J3.
[0719] Seq ID No. 602: Codon optimised DNA encoding 6×His Cellvibrio sp. glucosidase, Uniparc reference UPI000260108C, Uniprot reference I3IDC0.
[0720] Seq ID No. 603: Codon optimised DNA encoding 6×His Flavobacterium sp. glucosidase, Uniparc reference UPI000272D1E0, Uniprot reference J1ACA0.
[0721] Seq ID No. 604: Codon optimised DNA encoding 6×His Macrophomina phaseolina glucosidase, Uniparc reference UPI00028E7FE1, Uniprot reference K2S5D3.
[0722] Seq ID No. 605: Codon optimised DNA encoding 6×His Kosmotoga olearia glucosidase, Uniparc reference UPI00018483A2, Uniprot reference C5CHI5.
[0723] Seq ID No. 606: Codon optimised DNA encoding 6×His Blautia obeum glucosidase, Uniparc reference UPI0001CD5918, Uniprot reference D4LRF6.
[0724] Seq ID No. 607: Codon optimised DNA encoding 6×His Bifidobacterium dentium glucosidase, Uniparc reference UPI0001E18CDA, Uniprot reference E0Q541.
[0725] Seq ID No. 608: Codon optimised DNA encoding 6×His Anaerolinea thermophila glucosidase, Uniparc reference UPI0001F55F8F, Uniprot reference E8N5R8.
[0726] Seq ID No. 609: Codon optimised DNA encoding 6×His Coriobacterium glomerans glucosidase, Uniparc reference UPI0002050DA2, Uniprot reference F2N7E4.
[0727] Seq ID No. 610: Codon optimised DNA encoding 6×His Microlunatus phosphovorus glucosidase, Uniparc reference UPI000210C886, Uniprot reference F5XJQ3.
[0728] Seq ID No. 611: Codon optimised DNA encoding 6×His Streptomyces sp. glucosidase, Uniparc reference UPI0001C18877, Uniprot reference G0Q1U8.
[0729] Seq ID No. 612: Codon optimised DNA encoding 6×His Spathaspora passalidarum glucosidase, Uniparc reference UPI0002282B61, Uniprot reference G3AIV6.
[0730] Seq ID No. 613: Codon optimised DNA encoding 6×His Glarea lozoyensis glucosidase, Uniparc reference UPI0002402F4A, Uniprot reference H0ET34.
[0731] Seq ID No. 614: Codon optimised DNA encoding 6×His Glaciozyma antarctica glucosidase, Uniparc reference UPI0002633B36, Uniprot reference I3UJK0.
[0732] Seq ID No. 615: Codon optimised DNA encoding 6×His Arthrobacter sp. glucosidase, Uniparc reference UPI00027DFD35, Uniprot reference J7LN00.
[0733] Seq ID No. 616: Codon optimised DNA encoding 6×His Fusarium pseudograminearum glucosidase, Uniparc reference UPI00028D698C, Uniprot reference K3VMA9.
[0734] Seq ID No. 617: Codon optimised DNA encoding 6×His Hypocrea rufa glucosidase, Uniparc reference UPI000006AA61, Uniprot reference C6GGC9.
[0735] Seq ID No. 618: Codon optimised DNA encoding 6×His Ruminococcus torques glucosidase, Uniparc reference UPI0001CDA964, Uniprot reference D4M6W6.
[0736] Seq ID No. 619: Codon optimised DNA encoding 6×His Bifidobacterium dentium glucosidase, Uniparc reference UPI0001E17370, Uniprot reference E0Q9Z7.
[0737] Seq ID No. 620: Codon optimised DNA encoding 6×His Bacteroides salanitronis glucosidase, Uniparc reference UPI0001FC71F6, Uniprot reference F0R2D7.
[0738] Seq ID No. 621: Codon optimised DNA encoding 6×His Bacteroides coprosuis glucosidase, Uniparc reference UPI00020E6D19, Uniprot reference F3ZQ40.
[0739] Seq ID No. 622: Codon optimised DNA encoding 6×His Marinomonas posidonica glucosidase, Uniparc reference UPI00020D4CC6, Uniprot reference F6CWF6.
[0740] Seq ID No. 623: Codon optimised DNA encoding 6×His Chaetomium thermophilum glucosidase, Uniparc reference UPI000227E8ED, Uniprot reference G0SE64.
[0741] Seq ID No. 624: Codon optimised DNA encoding 6×His Tetragenococcus halophilus glucosidase, Uniparc reference UPI00022B9A15, Uniprot reference G4L5K1.
[0742] Seq ID No. 625: Codon optimised DNA encoding 6×His Paenibacillus sp. glucosidase, Uniparc reference UPI00024F0867, Uniprot reference H6CCZ8.
[0743] Seq ID No. 626: Codon optimised DNA encoding 6×His Turneriella parva glucosidase, Uniparc reference UPI000265AA4B, Uniprot reference 14B8U7.
[0744] Seq ID No. 627: Codon optimised DNA encoding 6×His Arthrobacter sp. glucosidase, Uniparc reference UPI00027DFDB2, Uniprot reference J7LQK9.
[0745] Seq ID No. 628: Codon optimised DNA encoding 6×His Agaricus bisporus glucosidase, Uniparc reference UPI00029074B1, Uniprot reference K5W7V1.
[0746] Seq ID No. 629: Codon optimised DNA encoding 6×His Nectria haematococca glucosidase, Uniparc reference UPI0001B67634, Uniprot reference C7YIP3.
[0747] Seq ID No. 630: Codon optimised DNA encoding 6×His Bacteroides xylanisolvens glucosidase, Uniparc reference UPI0001A25287, Uniprot reference D4VSZ0.
[0748] Seq ID No. 631: Codon optimised DNA encoding 6×His Sediminispirochaeta smaragdinae glucosidase, Uniparc reference UPI0001DD9790, Uniprot reference E1R331.
[0749] Seq ID No. 632: Codon optimised DNA encoding 6×His Deinococcus proteolyticus glucosidase, Uniparc reference UPI0001FC42E9, Uniprot reference F0RPV2.
[0750] Seq ID No. 633: Codon optimised DNA encoding 6×His Sphingobacterium sp. glucosidase, Uniparc reference UPI0002033A0A, Uniprot reference F4C226.
[0751] Seq ID No. 634: Codon optimised DNA encoding 6×His Sphingobium chlorophenolicum glucosidase, Uniparc reference UPI0001E54133, Uniprot reference F6ET40.
[0752] Seq ID No. 635: Codon optimised DNA encoding 6×His Caloramator australicus glucosidase, Uniparc reference UPI00021CACC4, Uniprot reference G0V3V5.
[0753] Seq ID No. 636: Codon optimised DNA encoding 6×His Commensalibacter intestini glucosidase, Uniparc reference UPI000230E3BF, Uniprot reference G6F370.
[0754] Seq ID No. 637: Codon optimised DNA encoding 6×His Paenibacillus sp. glucosidase, Uniparc reference UPI00024F07AC, Uniprot reference H6CIT2.
[0755] Seq ID No. 638: Codon optimised DNA encoding 6×His Nitrolancea hollandica glucosidase, Uniparc reference UPI0002638AF3, Uniprot reference I4EIA9.
[0756] Seq ID No. 639: Codon optimised DNA encoding 6×His Cryptococcus neoformans glucosidase, Uniparc reference UPI000392C3ED, Uniprot reference J9VVK7.
[0757] Seq ID No. 640: Codon optimised DNA encoding 6×His Acidipropionibacterium acidipropionici glucosidase, Uniparc reference UPI0002988588, Uniprot reference K75596.
[0758] Seq ID No. 641: Codon optimised DNA encoding 6×His Prevotella sp. glucosidase, Uniparc reference UPI0001B93465, Uniprot reference C9PT75.
[0759] Seq ID No. 642: Codon optimised DNA encoding 6×His Rhodobacter capsulatus glucosidase, Uniparc reference UPI0001D08095, Uniprot reference D5ALU0.
[0760] Seq ID No. 643: Codon optimised DNA encoding 6×His Stigmatella aurantiaca glucosidase, Uniparc reference UPI0001E74370, Uniprot reference E3FJ05.
[0761] Seq ID No. 644: Codon optimised DNA encoding 6×His Sphaerochaeta globosa glucosidase, Uniparc reference UPI0002010060, Uniprot reference F0RVK3.
[0762] Seq ID No. 645: Codon optimised DNA encoding 6×His Sphaerochaeta coccoides glucosidase, Uniparc reference UPI000207D78C, Uniprot reference F4GH96.
[0763] Seq ID No. 646: Codon optimised DNA encoding 6×His Novosphingobium sp. glucosidase, Uniparc reference UPI00020EFBCB, Uniprot reference F6ICQ5.
[0764] Seq ID No. 647: Codon optimised DNA encoding 6×His Arthrobotrys oligospora glucosidase, Uniparc reference UPI000225331F, Uniprot reference G1XH86.
[0765] Seq ID No. 648: Codon optimised DNA encoding 6×His Lactococcus lactis glucosidase, Uniparc reference UPI00000C6907, Uniprot reference G6FFS4.
[0766] Seq ID No. 649: Codon optimised DNA encoding 6×His Phaeospirillum molischianum glucosidase, Uniparc reference UPI000255313A, Uniprot reference H8FXH7.
[0767] Seq ID No. 650: Codon optimised DNA encoding 6×His Modestobacter marinus glucosidase, Uniparc reference UPI0002609C68, Uniprot reference I4EW72.
[0768] Seq ID No. 651: Codon optimised DNA encoding 6×His Saccharothrix espanaensis glucosidase, Uniparc reference UPI00028AC337, Uniprot reference K0K125.
[0769] Seq ID No. 652: Codon optimised DNA encoding 6×His Cronobacter sakazakii glucosidase, Uniparc reference UPI00029BA293, Uniprot reference K8DAK0.
[0770] Seq ID No. 653: Codon optimised DNA encoding 6×His Verticillium alfalfae glucosidase, Uniparc reference UPI0001BBDF1E, Uniprot reference C9SVX1.
[0771] Seq ID No. 654: Codon optimised DNA encoding 6×His Bacteroides xylanisolvens glucosidase, Uniparc reference UPI0001CCFD36, Uniprot reference D6CY10.
[0772] Seq ID No. 655: Codon optimised DNA encoding 6×His Leadbetterella byssophila glucosidase, Uniparc reference UPI0001EBD98A, Uniprot reference E4RUR0.
[0773] Seq ID No. 656: Codon optimised DNA encoding 6×His Sphaerochaeta globosa glucosidase, Uniparc reference UPI00020102A5, Uniprot reference F0RYB6.
[0774] Seq ID No. 657: Codon optimised DNA encoding 6×His Sphaerochaeta coccoides glucosidase, Uniparc reference UPI000207D6A0, Uniprot reference F4GLH6.
[0775] Seq ID No. 658: Codon optimised DNA encoding 6×His Haloplasma contractile glucosidase, Uniparc reference UPI000212252C, Uniprot reference F7Q0Y2.
[0776] Seq ID No. 659: Codon optimised DNA encoding 6×His Nitrospirillum amazonense glucosidase, Uniparc reference UPI0002265447, Uniprot reference G1Y407.
[0777] Seq ID No. 660: Codon optimised DNA encoding 6×His Azospirillum brasilense glucosidase, Uniparc reference UPI00023420B8, Uniprot reference G8AWD9.
[0778] Seq ID No. 661: Codon optimised DNA encoding 6×His Phaeospirillum molischianum glucosidase, Uniparc reference UPI000255314F, Uniprot reference H8FXJ8.
[0779] Seq ID No. 662: Codon optimised DNA encoding 6×His Modestobacter marinus glucosidase, Uniparc reference UPI000260A2FA, Uniprot reference I4EYD5.
[0780] Seq ID No. 663: Codon optimised DNA encoding 6×His Wickerhamomyces ciferrii glucosidase, Uniparc reference UPI000283EB8D, Uniprot reference K0KVJ2.
[0781] Seq ID No. 664: Codon optimised DNA encoding 6×His Gloeocapsa sp. glucosidase, Uniparc reference UPI0002A5D085, Uniprot reference K9XKL8.
[0782] Seq ID No. 665: Codon optimised DNA encoding 6×His Sphaerobacter thermophilus glucosidase, Uniparc reference UPI0001A3BCB6, Uniprot reference D1C7U8.
[0783] Seq ID No. 666: Codon optimised DNA encoding 6×His Bacteroides xylanisolvens glucosidase, Uniparc reference UPI0001CCEF1F, Uniprot reference D6D4V2.
[0784] Seq ID No. 667: Codon optimised DNA encoding 6×His Prevotella buccae glucosidase, Uniparc reference UPI0001F149E8, Uniprot reference E6K4W5.
[0785] Seq ID No. 668: Codon optimised DNA encoding 6×His Grosmannia clavigera glucosidase, Uniparc reference UPI0001FF1101, Uniprot reference F0XBR0.
[0786] Seq ID No. 669: Codon optimised DNA encoding 6×His Melampsora larici-populina glucosidase, Uniparc reference UPI00020F9774, Uniprot reference F4R4W2.
[0787] Seq ID No. 670: Codon optimised DNA encoding 6×His Prevotella multisaccharivorax glucosidase, Uniparc reference UPI0002138E9C, Uniprot reference F8N7G1.
[0788] Seq ID No. 671: Codon optimised DNA encoding 6×His Streptomyces zinciresistens glucosidase, Uniparc reference UPI0002255A63, Uniprot reference G2G8K4.
[0789] Seq ID No. 672: Codon optimised DNA encoding 6×His Granulicella mallensis glucosidase, Uniparc reference UPI0001D9FC40, Uniprot reference G8NY42.
[0790] Seq ID No. 673: Codon optimised DNA encoding 6×His Gibberella zeae glucosidase, Uniparc reference UPI00021F1FEE, Uniprot reference I1RH94.
[0791] Seq ID No. 674: Codon optimised DNA encoding 6×His Modestobacter marinus glucosidase, Uniparc reference UPI00026090A2, Uniprot reference I4EYK6.
[0792] Seq ID No. 675: Codon optimised DNA encoding 6×His Lactobacillus equicursoris glucosidase, Uniparc reference UPI0002869F55, Uniprot reference K0NRS8.
[0793] Seq ID No. 676: Codon optimised DNA encoding 6×His Colletotrichum fructicola glucosidase, Uniparc reference UPI0002A93280, Uniprot reference L2F9W0.
[0794] Seq ID No. 677: Codon optimised DNA encoding 6×His Streptosporangium roseum glucosidase, Uniparc reference UPI0001BF8AF6, Uniprot reference D2B261.
[0795] Seq ID No. 678: Codon optimised DNA encoding 6×His Listeria grayi glucosidase, Uniparc reference UPI00019F252A, Uniprot reference D7UX19.
[0796] Seq ID No. 679: Codon optimised DNA encoding 6×His Enterococcus italicus glucosidase, Uniparc reference UPI0001F11EFF, Uniprot reference E6LF07.
[0797] Seq ID No. 680: Codon optimised DNA encoding 6×His Fluviicola taffensis glucosidase, Uniparc reference UPI000203D9EA, Uniprot reference F2IIT6.
[0798] Seq ID No. 681: Codon optimised DNA encoding 6×His Shigella flexneri glucosidase, Uniparc reference UPI00020CA641, Uniprot reference F5N4W9.
[0799] Seq ID No. 682: Codon optimised DNA encoding 6×His Actinomyces sp. glucosidase, Uniparc reference UPI0002189080, Uniprot reference F9EFW5.
[0800] Seq ID No. 683: Codon optimised DNA encoding 6×His Verticillium dahliae glucosidase, Uniparc reference UPI00022EBE5A, Uniprot reference G2X5V6.
[0801] Seq ID No. 684: Codon optimised DNA encoding 6×His Actinoplanes sp. glucosidase, Uniparc reference UPI00023ED5A8, Uniprot reference G8S0M0.
[0802] Seq ID No. 685: Codon optimised DNA encoding 6×His Gibberella zeae glucosidase, Uniparc reference UPI000023EA29, Uniprot reference I1S320.
[0803] Seq ID No. 686: Codon optimised DNA encoding 6×His Auricularia subglabra glucosidase, Uniparc reference UPI00027CE685, Uniprot reference J0WV06.
[0804] Seq ID No. 687: Codon optimised DNA encoding 6×His Nitratireductor indicus glucosidase, Uniparc reference UPI00028E86D6, Uniprot reference K2N268.
[0805] Seq ID No. 688: Codon optimised DNA encoding 6×His Thermoclostridium stercorarium glucosidase, Uniparc reference UPI0002AD999E, Uniprot reference L7VH66.
[0806] Seq ID No. 689: Codon optimised DNA encoding 6×His Geobacillus sp. glucosidase, Uniparc reference UPI0002AF2DE3, Uniprot reference L8A1S2.
[0807] Seq ID No. 690: Codon optimised DNA encoding 6×His uncultured bacterium glucosidase, Uniparc reference UPI000327C3CC, Uniprot reference M9ZC55.
[0808] Seq ID No. 691: Codon optimised DNA encoding 6×His Burkholderia ambifaria glucosidase, Uniparc reference UPI000059ACE1, Uniprot reference Q0BAK2.
[0809] Seq ID No. 692: Codon optimised DNA encoding 6×His Aspergillus oryzae glucosidase, Uniparc reference UPI0000676B8D, Uniprot reference Q2UIR4.
[0810] Seq ID No. 693: Codon optimised DNA encoding 6×His Yersinia pseudotuberculosis glucosidase, Uniparc reference UPI00004269B5, Uniprot reference Q66DJ0.
[0811] Seq ID No. 694: Codon optimised DNA encoding 6×His Wallemia ichthyophaga glucosidase, Uniparc reference UPI000331CC98, Uniprot reference R9AF64.
[0812] Seq ID No. 695: Codon optimised DNA encoding 6×His Glarea lozoyensis glucosidase, Uniparc reference UPI0003522404, Uniprot reference S3DIM6.
[0813] Seq ID No. 696: Codon optimised DNA encoding 6×His Moniliophthora roreri glucosidase, Uniparc reference UPI0003BF753A, Uniprot reference V2YU31.
[0814] Seq ID No. 697: Codon optimised DNA encoding 6×His Zhouia amylolytica glucosidase, Uniparc reference UPI0003DBCB4F, Uniprot reference W2ULL3.
[0815] Seq ID No. 698: Codon optimised DNA encoding 6×His Fusarium oxysporum glucosidase, Uniparc reference UPI0003F362FF, Uniprot reference W9NQQ3.
[0816] Seq ID No. 699: Codon optimised DNA encoding 6×His Flavobacterium johnsoniae glucosidase, Uniparc reference UPI00006EA168, Uniprot reference A5FAA5.
[0817] Seq ID No. 700: Codon optimised DNA encoding 6×His Oryza sativa glucosidase, Uniparc reference UPI00002394F5, Uniprot reference Q75I93.
[0818] Seq ID No. 701: Codon optimised DNA encoding 6×His Clostridium saccharoperbutylacetonicum glucosidase, Uniparc reference UPI0002B65681, Uniprot reference M1MCD1.
[0819] Seq ID No. 702: Codon optimised DNA encoding 6×His Rhodococcus sp. glucosidase, Uniparc reference UPI0002D21DB1, Uniprot reference N1MBN6.
[0820] Seq ID No. 703: Codon optimised DNA encoding 6×His Burkholderia ambifaria glucosidase, Uniparc reference UPI000059C0CD, Uniprot reference Q0BCV8.
[0821] Seq ID No. 704: Codon optimised DNA encoding 6×His Xanthomonas campestris glucosidase, Uniparc reference UPI00005CE9E7, Uniprot reference Q3BVH7.
[0822] Seq ID No. 705: Codon optimised DNA encoding 6×His Caulobacter vibrioides glucosidase, Uniparc reference UPI00000C7604, Uniprot reference Q9A6F8.
[0823] Seq ID No. 706: Codon optimised DNA encoding 6×His Arcticibacter svalbardensis glucosidase, Uniparc reference UPI000338772A, Uniprot reference R9GRA7.
[0824] Seq ID No. 707: Codon optimised DNA encoding 6×His Winogradskyella psychrotolerans glucosidase, Uniparc reference UPI00035A4604, Uniprot reference S7VQ28.
[0825] Seq ID No. 708: Codon optimised DNA encoding 6×His Methyloglobulus morosus glucosidase, Uniparc reference UPI0003C4ED6A, Uniprot reference V5DXT8.
[0826] Seq ID No. 709: Codon optimised DNA encoding 6×His Pestalotiopsis fici glucosidase, Uniparc reference UPI0003E05C04, Uniprot reference W3WV37.
[0827] Seq ID No. 710: Codon optimised DNA encoding 6×His Capronia coronata glucosidase, Uniparc reference UPI000434E698, Uniprot reference W9YNR7.
[0828] Seq ID No. 711: Codon optimised DNA encoding 6×His Aspergillus aculeatus glucosidase, Uniparc reference UPI00001268FD, Uniprot reference P48825.
[0829] Seq ID No. 712: Codon optimised DNA encoding 6×His Thermotoga neapolitana glucosidase, Uniparc reference UPI0000DD5996, Uniprot reference Q0GC07.
[0830] Seq ID No. 713: Codon optimised DNA encoding 6×His Clostridium saccharoperbutylacetonicum glucosidase, Uniparc reference UPI0002B666E8, Uniprot reference M1MJF4.
[0831] Seq ID No. 714: Codon optimised DNA encoding 6×His Schizosaccharomyces pombe glucosidase, Uniparc reference UPI000006B001, Uniprot reference O74799.
[0832] Seq ID No. 715: Codon optimised DNA encoding 6×His Phaeosphaeria nodorum glucosidase, Uniparc reference UPI000161BD2B, Uniprot reference Q0TXF6.
[0833] Seq ID No. 716: Codon optimised DNA encoding 6×His Xylella fastidiosa Dixon glucosidase, Uniparc reference UPI00003806C8, Uniprot reference Q3RGJ3.
[0834] Seq ID No. 717: Codon optimised DNA encoding 6×His Schizosaccharomyces pombe glucosidase, Uniparc reference UPI000006A330, Uniprot reference Q9P6J6.
[0835] Seq ID No. 718: Codon optimised DNA encoding 6×His Arcticibacter svalbardensis glucosidase, Uniparc reference UPI000337E887, Uniprot reference R9GWD6.
[0836] Seq ID No. 719: Codon optimised DNA encoding 6×His Colletotrichum gloeosporioides glucosidase, Uniparc reference UPI0003885717, Uniprot reference T0KJI7.
[0837] Seq ID No. 720: Codon optimised DNA encoding 6×His uncultured bacterium glucosidase, Uniparc reference UPI0003C9E340, Uniprot reference V5R1E8.
[0838] Seq ID No. 721: Codon optimised DNA encoding 6×His Xanthomonas arboricola glucosidase, Uniparc reference UPI0003E06A61, Uniprot reference W4S7I5.
[0839] Seq ID No. 722: Codon optimised DNA encoding 6×His Fusarium oxysporum glucosidase, Uniparc reference UPI00021EC697, Uniprot reference X0A8X8.
[0840] Seq ID No. 723: Codon optimised DNA encoding 6×His Paenibacillus polymyxa glucosidase, Uniparc reference UPI00001108D0, Uniprot reference P22073.
[0841] Seq ID No. 724: Codon optimised DNA encoding 6×His Kluyveromyces marxianus glucosidase, Uniparc reference UPI0001BE5ADA, Uniprot reference D1GCC6.
[0842] Seq ID No. 725: Codon optimised DNA encoding 6×His Ilumatobacter coccineus glucosidase, Uniparc reference UPI0002C04A25, Uniprot reference M5A594.
[0843] Seq ID No. 726: Codon optimised DNA encoding 6×His Agrobacterium sp. glucosidase, Uniparc reference UPI0000126912, Uniprot reference P12614.
[0844] Seq ID No. 727: Codon optimised DNA encoding 6×His Cytophaga hutchinsonii glucosidase, Uniparc reference UPI000038ECF7, Uniprot reference Q11P53.
[0845] Seq ID No. 728: Codon optimised DNA encoding 6×His Thermobifida fusca glucosidase, Uniparc reference UPI00003C5CA4, Uniprot reference Q47PF5.
[0846] Seq ID No. 729: Codon optimised DNA encoding 6×His Botryotinia fuckeliana glucosidase, Uniparc reference UPI0000069E5E, Uniprot reference Q9UVJ6.
[0847] Seq ID No. 730: Codon optimised DNA encoding 6×His Agarivorans albus glucosidase, Uniparc reference UPI00033994D2, Uniprot reference R9PTK2.
[0848] Seq ID No. 731: Codon optimised DNA encoding 6×His Enterococcus sp. glucosidase, Uniparc reference UPI00038B7639, Uniprot reference T0UDU2.
[0849] Seq ID No. 732: Codon optimised DNA encoding 6×His Salinispira pacifica glucosidase, Uniparc reference UPI0003D8A7DC, Uniprot reference V5WKT4.
[0850] Seq ID No. 733: Codon optimised DNA encoding 6×His Bacteroides xylanisolvens glucosidase, Uniparc reference UPI0003ECF15E, Uniprot reference W6P696.
[0851] Seq ID No. 734: Codon optimised DNA encoding 6×His Fusarium oxysporum glucosidase, Uniparc reference UPI000430029A, Uniprot reference X0AB46.
[0852] Seq ID No. 735: Codon optimised DNA encoding 6×His Thermotoga maritima glucosidase, Uniparc reference UPI0000126906, Uniprot reference Q08638B.
[0853] Seq ID No. 736: Codon optimised DNA encoding 6×His Neotermes koshunensis glucosidase, Uniparc reference UPI0000083EA8, Uniprot reference Q8T0W7.
[0854] Seq ID No. 737: Codon optimised DNA encoding 6×His Thanatephorus cucumeris glucosidase, Uniparc reference UPI0002BF34B3, Uniprot reference M5CHG9.
[0855] Seq ID No. 738: Codon optimised DNA encoding 6×His Hungateiclostridium thermocellum glucosidase, Uniparc reference UPI000053581D, Uniprot reference P14002.
[0856] Seq ID No. 739: Codon optimised DNA encoding 6×His Koribacter versatilis glucosidase, Uniparc reference UPI0000D76A70, Uniprot reference Q1IJ89.
[0857] Seq ID No. 740: Codon optimised DNA encoding 6×His Neosartorya fumigata glucosidase, Uniparc reference UPI00005203D8, Uniprot reference Q4WLX5.
[0858] Seq ID No. 741: Codon optimised DNA encoding 6×His Amycolatopsis vancoresmycina glucosidase, Uniparc reference UPI00032DB8C1, Uniprot reference R1FKF0.
[0859] Seq ID No. 742: Codon optimised DNA encoding 6×His Gibberella fujikuroi glucosidase, Uniparc reference UPI0003519C76, Uniprot reference S0EKU1.
[0860] Seq ID No. 743: Codon optimised DNA encoding 6×His Bifidobacterium longum glucosidase, Uniparc reference UPI000390F839, Uniprot reference T2I2H5.
[0861] Seq ID No. 744: Codon optimised DNA encoding 6×His uncultured bacterium glucosidase, Uniparc reference UPI0003DFF0DA, Uniprot reference W0FLD1.
[0862] Seq ID No. 745: Codon optimised DNA encoding 6×His Bacteroides xylanisolvens glucosidase, Uniparc reference UPI0002D3D994, Uniprot reference W6P9J9.
[0863] Seq ID No. 746: Codon optimised DNA encoding 6×His Fusarium oxysporum glucosidase, Uniparc reference UPI00042F8016, Uniprot reference X0HA35.
[0864] Seq ID No. 747: Codon optimised DNA encoding 6×His Sorghum bicolor glucosidase, Uniparc reference UPI00000A7F40, Uniprot reference Q41290.
[0865] Seq ID No. 748: Codon optimised DNA encoding 6×His Clostridium cellulovorans glucosidase, Uniparc reference UPI000050B701, Uniprot reference Q53EH2.
[0866] Seq ID No. 749: Codon optimised DNA encoding 6×His Dacryopinax primogenitus glucosidase, Uniparc reference UPI0002C29EAA, Uniprot reference M5G1U5.
[0867] Seq ID No. 750: Codon optimised DNA encoding 6×His Rhizobium radiobacter glucosidase, Uniparc reference UPI0000126913, Uniprot reference P27034.
[0868] Seq ID No. 751: Codon optimised DNA encoding 6×His Phanerochaete chrysosporium glucosidase, Uniparc reference UPI00006E0CC7, Uniprot reference Q25BW5A.
[0869] Seq ID No. 752: Codon optimised DNA encoding 6×His Enterobacter agglomerans glucosidase, Uniparc reference UPI0000126905, Uniprot reference Q59437.
[0870] Seq ID No. 753: Codon optimised DNA encoding 6×His Candidatus microthrix glucosidase, Uniparc reference UPI00033056C4, Uniprot reference R4YWU4.
[0871] Seq ID No. 754: Codon optimised DNA encoding 6×His Chthonomonas calidirosea glucosidase, Uniparc reference UPI0003427F29, Uniprot reference S0ET37.
[0872] Seq ID No. 755: Codon optimised DNA encoding 6×His Acholeplasma brassicae glucosidase, Uniparc reference UPI0003B04208, Uniprot reference U4KMR7.
[0873] Seq ID No. 756: Codon optimised DNA encoding 6×His Chania multitudinisentens glucosidase, Uniparc reference UPI0003E13BD3, Uniprot reference W0LJ28.
[0874] Seq ID No. 757: Codon optimised DNA encoding 6×His Gibberella moniliformis glucosidase, Uniparc reference UPI0003ECCF80, Uniprot reference W7MW98.
[0875] Seq ID No. 758: Codon optimised DNA encoding 6×His Fusarium oxysporum glucosidase, Uniparc reference UPI0004305856, Uniprot reference X0I2U8.
[0876] Seq ID No. 759: Codon optimised DNA encoding 6×His Phanerochaete chrysosporium glucosidase, Uniparc reference UPI00006E0CC7, Uniprot reference Q25BW5B.
[0877] Seq ID No. 760: Codon optimised DNA encoding 6×His Secale cereale glucosidase, Uniparc reference UPI00000A7EFC, Uniprot reference Q9FYS3.
[0878] Seq ID No. 761: Codon optimised DNA encoding 6×His Anoxybacillus gonensis glucosidase, Uniparc reference UPI0002C0273E, Uniprot reference M5QUM2.
[0879] Seq ID No. 762: Codon optimised DNA encoding 6×His Thermotoga maritima glucosidase, Uniparc reference UPI0000126906, Uniprot reference Q08638A.
[0880] Seq ID No. 763: Codon optimised DNA encoding 6×His Rhodospirillum rubrum glucosidase, Uniparc reference UPI00003C2ACC, Uniprot reference Q2RP51.
[0881] Seq ID No. 764: Codon optimised DNA encoding 6×His Thermotoga neapolitana glucosidase, Uniparc reference UPI00000B9013, Uniprot reference Q60038.
[0882] Seq ID No. 765: Codon optimised DNA encoding 6×His Candidatus microthrix glucosidase, Uniparc reference UPI00032F466E, Uniprot reference R4Z6M6.
[0883] Seq ID No. 766: Codon optimised DNA encoding 6×His Ruminiclostridium cellobioparum glucosidase, Uniparc reference UPI00032874EC, Uniprot reference S0FPI8.
[0884] Seq ID No. 767: Codon optimised DNA encoding 6×His Acholeplasma brassicae glucosidase, Uniparc reference UPI0003B0490C, Uniprot reference U4KMV4.
[0885] Seq ID No. 768: Codon optimised DNA encoding 6×His Klebsiella pneumoniae glucosidase, Uniparc reference UPI0003DB6EFD, Uniprot reference W1BBP5.
[0886] Seq ID No. 769: Codon optimised DNA encoding 6×His Enterobacter sp. glucosidase, Uniparc reference UPI0003ED0A8E, Uniprot reference W7P6Y1.
[0887] Seq ID No. 770: Codon optimised DNA encoding 6×His Rhizoctonia solani glucosidase, Uniparc reference UPI00045BB507, Uniprot reference X8JI88.
[0888] Seq ID No. 771: Codon optimised DNA encoding 6×His Homo sapiens glucosidase, Uniparc reference UPI0000072C73, Uniprot reference Q9H227.
[0889] Seq ID No. 772: Codon optimised DNA encoding 6×His uncultured bacterium glucosidase, Uniparc reference UPI0000DD5304, Uniprot reference Q0GMU3.
[0890] Seq ID No. 773: Codon optimised DNA encoding 6×His Thermoanaerobacter thermohydrosulfuricus glucosidase, Uniparc reference UPI0002CA9E4F, Uniprot reference M8CQD9.
[0891] Seq ID No. 774: Codon optimised DNA encoding 6×His Stigmatella aurantiaca glucosidase, Uniparc reference UPI0000E297D8, Uniprot reference Q091M8.
[0892] Seq ID No. 775: Codon optimised DNA encoding 6×His Burkholderia thailandensis glucosidase, Uniparc reference UPI00006676B1, Uniprot reference Q2T7C9.
[0893] Seq ID No. 776: Codon optimised DNA encoding 6×His Yersinia pseudotuberculosis glucosidase, Uniparc reference UPI0000426E8F, Uniprot reference Q665S2.
[0894] Seq ID No. 777: Codon optimised DNA encoding 6×His Togninia minima glucosidase, Uniparc reference UPI00032BF71F, Uniprot reference R8BQM8.
[0895] Seq ID No. 778: Codon optimised DNA encoding 6×His Ophiostoma piceae glucosidase, Uniparc reference UPI00035213C2, Uniprot reference S3BVJ8.
[0896] Seq ID No. 779: Codon optimised DNA encoding 6×His Pyronema omphalodes glucosidase, Uniparc reference UPI0003B117B7, Uniprot reference U4LIL3.
[0897] Seq ID No. 780: Codon optimised DNA encoding 6×His Ogataea parapolymorpha glucosidase, Uniparc reference UPI0001F76D1F, Uniprot reference W1QIW0.
[0898] Seq ID No. 781: Codon optimised DNA encoding 6×His Hymenobacter swuensis glucosidase, Uniparc reference UPI0003F2059F, Uniprot reference W8F6U0.
[0899] Seq ID No. 782: Codon optimised DNA encoding 6×His Flavobacterium johnsoniae glucosidase, Uniparc reference UPI00006E8E1B, Uniprot reference A5FEF5.
[0900] Seq ID No. 783: Codon optimised DNA encoding 6×His Paenibacillus polymyxa glucosidase, Uniparc reference UPI000012690B, Uniprot reference P22505.
[0901] Seq ID No. 784: Codon optimised DNA encoding 6×His Oryza sativa glucosidase, Uniparc reference UPI000009D014, Uniprot reference Q8L7J2.
[0902] Seq ID No. 785: Codon optimised DNA encoding 6×His Oryza sativa glucosidase, Uniparc reference UPI0000E580F2, Uniprot reference B8AVF0.
[0903] Seq ID No. 786: Codon optimised DNA encoding 6×His Nannochloris glucosidase, Uniparc reference UPI000EA7F16F, Uniprot reference A0A452CSM4.
[0904] Seq ID No. 787: Codon optimised DNA encoding 6×His Halothermothrix orenii glucosidase, Uniparc reference UPI00006AE508, Uniprot reference B8CYA8.
[0905] Seq ID No. 788: Codon optimised DNA encoding 6×His Neurospora crassa glucosidase, Uniparc reference UPI000018B2B4, Uniprot reference Q7RWP2.
[0906] Seq ID No. 789: Codon optimised DNA encoding 6×His Micrococcus antarcticus glucosidase, Uniparc reference UPI000192BB5F, Uniprot reference B9V8P5.
[0907] Seq ID No. 790: Codon optimised DNA encoding 6×His Exiguobacterium antarcticum glucosidase, Uniparc reference UPI000285E79E, Uniprot reference K0A8J9.
[0908] Seq ID No. 791: Codon optimised DNA encoding 6×His Thermus thermophilus glucosidase, Uniparc reference UPI00000BEB61, Uniprot reference Q9RA61.
[0909] Seq ID No. 792: Codon optimised DNA encoding 6×His Trichoderma harzianum glucosidase, Uniparc reference UPI00078BF747, Uniprot reference A0A2T4AR08.
[0910] Seq ID No. 793: Codon optimised DNA encoding 6×His Hypocrea jecorina glucosidase, Uniparc reference UPI000006AA61, Uniprot reference Q12715.
[0911] Seq ID No. 794: Codon optimised DNA encoding 6×His Streptomyces sp. glucosidase, Uniparc reference UPI00000B411B, Uniprot reference Q59976.
[0912] Seq ID No. 795: Codon optimised DNA encoding 6×His Streptococcus pyogenes glucosidase, Uniparc reference UPI00000C7E56, Uniprot reference Q99YP9.
[0913] Seq ID No. 796: Codon optimised DNA encoding 6×His Trifolium repens glucosidase, Uniparc reference UPI000012691B, Uniprot reference P26205.
[0914] Seq ID No. 797: Codon optimised DNA encoding 6×His Talaromyces emersonii glucosidase, Uniparc reference UPI000006C8FF, Uniprot reference Q8TGI8.
[0915] Seq ID No. 798: Codon optimised DNA encoding 6×His Hungateiclostridium thermocellum glucosidase, Uniparc reference UPI0000126903, Uniprot reference P26208.
[0916] Seq ID No. 799: Codon optimised DNA encoding 6×His Lactobacillus plantarum glucosidase, Uniparc reference UPI000219FE3E, Uniprot reference F9ULH8.
[0917] Seq ID No. 800: Codon optimised DNA encoding 6×His Agrobacterium tumefaciens glucosidase, Uniparc reference UPI0003F2033A, Uniprot reference A0A2I4PGZ0.
[0918] Seq ID No. 801: Amino acid sequence for Bifidobacterium actinocoloniiforme glucosidase, Uniparc reference UPI000503B26C, Uniprot reference A0A086YYS8.
[0919] Seq ID No. 802: Amino acid sequence for Bifidobacterium psychraerophilum glucosidase, Uniparc reference UPI000502B461, Uniprot reference A0A087CD28.
[0920] Seq ID No. 803: Amino acid sequence for Penicillium italicum glucosidase, Uniparc reference UPI00052B8681, Uniprot reference A0A0A2K704.
[0921] Seq ID No. 804: Amino acid sequence for Microbacterium trichothecenolyticum glucosidase, Uniparc reference UPI0005ED0AE6, Uniprot reference A0A0M2HDB3.
[0922] Seq ID No. 805: Amino acid sequence for uncultured Clostridium sp. glucosidase, Uniparc reference UPI0008206F38, Uniprot reference A0A1C6I6A3.
[0923] Seq ID No. 806: Amino acid sequence for Bifiguratus adelaidae glucosidase, Uniparc reference UPI000BC57319, Uniprot reference A0A261Y7Q8.
[0924] Seq ID No. 807: Amino acid sequence for Paenibacillus thiaminolyticus glucosidase, Uniparc reference UPI000B3B73CD, Uniprot reference A0A378ZIK3.
[0925] Seq ID No. 808: Amino acid sequence for Microbacterium lemovicicum glucosidase, Uniparc reference UPI000F8FB9BA, Uniprot reference A0A3S9WE68.
[0926] Seq ID No. 809: Amino acid sequence for Rhodococcus erythropolis glucosidase, Uniparc reference UPI00019923DC, Uniprot reference C1A1N4.
[0927] Seq ID No. 810: Amino acid sequence for Cutibacterium avidum glucosidase, Uniparc reference UPI00022C19B5, Uniprot reference G4CZU8.
[0928] Seq ID No. 811: Amino acid sequence for Clavibacter michiganensis glucosidase, Uniparc reference UPI0002C5A938, Uniprot reference M5BD10.
[0929] Seq ID No. 8I2: Amino acid sequence for Microbacterium sp. glucosidase, Uniparc reference UPI0003DE3509, Uniprot reference W0ZC23.
[0930] Seq ID No. 813: Amino acid sequence for Bifidobacterium actinocoloniiforme glucosidase, Uniparc reference UPI000507F38A, Uniprot reference A0A086YZL4.
[0931] Seq ID No. 814: Amino acid sequence for Bifidobacterium reuteri glucosidase, Uniparc reference UPI000506119A, Uniprot reference A0A087CR26.
[0932] Seq ID No. 815: Amino acid sequence for Propionibacterium freudenreichii glucosidase, Uniparc reference UPI0005A5CAC2, Uniprot reference A0A0A8RX48.
[0933] Seq ID No. 816: Amino acid sequence for Microbacterium hydrocarbonoxydans glucosidase, Uniparc reference UPI0005EC18F9, Uniprot reference A0A0M2HRU0.
[0934] Seq ID No. 817: Amino acid sequence for Pseudonocardia sp. glucosidase, Uniparc reference UPI00094B6D3B, Uniprot reference A0A1Q8KSV8.
[0935] Seq ID No. 818: Amino acid sequence for Tuber aestivum glucosidase, Uniparc reference UPI000BC13DF0, Uniprot reference A0A292PKV5.
[0936] Seq ID No. 819: Amino acid sequence for Propionibacterium australiense glucosidase, Uniparc reference UPI000E5B4EA5, Uniprot reference A0A383S7A9.
[0937] Seq ID No. 820: Amino acid sequence for Fusarium sp. glucosidase, Uniparc reference UPI001004B2C9, Uniprot reference A0A428T6E2.
[0938] Seq ID No. 821: Amino acid sequence for Nectria haematococca glucosidase, Uniparc reference UPI0001B69B5C, Uniprot reference C7ZBV0.
[0939] Seq ID No. 822: Amino acid sequence for Actinoplanes sp. glucosidase, Uniparc reference UPI00023EBB15, Uniprot reference G8S3E7.
[0940] Seq ID No. 823: Amino acid sequence for Streptomyces fulvissimus glucosidase, Uniparc reference UPI0003289BC6, Uniprot reference N0CMW2.
[0941] Seq ID No. 824: Amino acid sequence for Pestalotiopsis fici glucosidase, Uniparc reference UPI0003E02BF1, Uniprot reference W3WXF1.
[0942] Seq ID No. 825: Amino acid sequence for Bifidobacterium bohemicum glucosidase, Uniparc reference UPI0005025F2E, Uniprot reference A0A086ZGP0.
[0943] Seq ID No. 826: Amino acid sequence for Bifidobacterium saeculare glucosidase, Uniparc reference UPI0005084E52, Uniprot reference A0A087D0Q2.
[0944] Seq ID No. 827: Amino acid sequence for Bionectria ochroleuca glucosidase, Uniparc reference UPI00059674D6, Uniprot reference A0A0B7JW24.
[0945] Seq ID No. 828: Amino acid sequence for Bifidobacterium pseudocatenulatum glucosidase, Uniparc reference UPI0006C6D6F9, Uniprot reference A0A174AU04.
[0946] Seq ID No. 829: Amino acid sequence for Pseudonocardia sp. glucosidase, Uniparc reference UPI00094ABAB3, Uniprot reference A0A1Q8LPB4.
[0947] Seq ID No. 830: Amino acid sequence for bacterium glucosidase, Uniparc reference UPI000CB49A0B, Uniprot reference A0A2H5Z8Q4.
[0948] Seq ID No. 831: Amino acid sequence for Coleophoma crateriformis glucosidase, Uniparc reference UPI000E38A995, Uniprot reference A0A3D8Q771.
[0949] Seq ID No. 832: Amino acid sequence for Arthrobotrys oligospora glucosidase, Uniparc reference UPI001102DFA3, Uniprot reference A0A4Z0Y5Y8.
[0950] Seq ID No. 833: Amino acid sequence for Pyrenophora teres glucosidase, Uniparc reference UPI0001ECDCBD, Uniprot reference E3RFS2.
[0951] Seq ID No. 834: Amino acid sequence for Gordonia polyisoprenivorans glucosidase, Uniparc reference UPI00024F2A26, Uniprot reference H6MTQ7.
[0952] Seq ID No. 835: Amino acid sequence for Stigmatella aurantiaca glucosidase, Uniparc reference UPI0000E28E5D, Uniprot reference Q08521.
[0953] Seq ID No. 836: Amino acid sequence for Pestalotiopsis fici glucosidase, Uniparc reference UPI0003E03A52, Uniprot reference W3WZ03.
[0954] Seq ID No. 837: Amino acid sequence for Bifidobacterium magnum glucosidase, Uniparc reference UPI0003B7B6EE, Uniprot reference A0A087BEN9.
[0955] Seq ID No. 838: Amino acid sequence for Bifidobacterium stellenboschense glucosidase, Uniparc reference UPI000503F283, Uniprot reference A0A087DFL8.
[0956] Seq ID No. 839: Amino acid sequence for Bionectria ochroleuca glucosidase, Uniparc reference UPI00059673EE, Uniprot reference A0A0B7K316.
[0957] Seq ID No. 840: Amino acid sequence for Hungatella hathewayi glucosidase, Uniparc reference UPI0006C069F3, Uniprot reference A0A174LVE3.
[0958] Seq ID No. 841: Amino acid sequence for Mycetocola reblochoni glucosidase, Uniparc reference UPI00097EB800, Uniprot reference A0A1R4J2F9.
[0959] Seq ID No. 842: Amino acid sequence for Nonomuraea sp. glucosidase, Uniparc reference UPI0009ABD7B3, Uniprot reference A0A2P9IX34.
[0960] Seq ID No. 843: Amino acid sequence for Coleophoma crateriformis glucosidase, Uniparc reference UPI000E391DF6, Uniprot reference A0A3D8T9C2.
[0961] Seq ID No. 844: Amino acid sequence for Paenarthrobacter aurescens glucosidase, Uniparc reference UPI0000EC83AE, Uniprot reference A1R2K1.
[0962] Seq ID No. 845: Amino acid sequence for Kitasatospora setae glucosidase, Uniparc reference UPI0001F21F08, Uniprot reference E4N4F6.
[0963] Seq ID No. 846: Amino acid sequence for Nocardiopsis alba glucosidase, Uniparc reference UPI00027E251E, Uniprot reference J7L3Z8.
[0964] Seq ID No. 847: Amino acid sequence for Rhodococcus jostii glucosidase, Uniparc reference UPI0000DBA338, Uniprot reference Q0SCI4.
[0965] Seq ID No. 848: Amino acid sequence for uncultured microorganism glucosidase, Uniparc reference UPI0003EC942D, Uniprot reference W5X324.
[0966] Seq ID No. 849: Amino acid sequence for Bifidobacterium merycicum glucosidase, Uniparc reference UPI0005084B63, Uniprot reference A0A087BJ88.
[0967] Seq ID No. 850: Amino acid sequence for Bifidobacterium scardovii glucosidase, Uniparc reference UPI0005018B5B, Uniprot reference A0A087DGT3.
[0968] Seq ID No. 851: Amino acid sequence for Fusarium oxysporum glucosidase, Uniparc reference UPI00021EC81E, Uniprot reference A0A0C4DJL4.
[0969] Seq ID No. 852: Amino acid sequence for Paraphaeosphaeria sporulosa glucosidase, Uniparc reference UPI0007CE199C, Uniprot reference A0A177BXH1.
[0970] Seq ID No. 853: Amino acid sequence for Clostridium oryzae glucosidase, Uniparc reference UPI0009A50F8D, Uniprot reference A0A1V4IY77.
[0971] Seq ID No. 854: Amino acid sequence for Corynespora cassiicola glucosidase, Uniparc reference UPI000D22F5EB, Uniprot reference A0A2T2N4T6.
[0972] Seq ID No. 855: Amino acid sequence for Choiromyces venosus glucosidase, Uniparc reference UPI000F7332F8, Uniprot reference A0A3N4J9R6.
[0973] Seq ID No. 856: Amino acid sequence for Saccharopolyspora erythraea glucosidase, Uniparc reference UPI0000F550EC, Uniprot reference A4F982.
[0974] Seq ID No. 857: Amino acid sequence for Streptomyces venezuelae glucosidase, Uniparc reference UPI000204906E, Uniprot reference F2R0Y2.
[0975] Seq ID No. 858: Amino acid sequence for Arthrobacter sp. glucosidase, Uniparc reference UPI00027DFDB0, Uniprot reference J7LVB1.
[0976] Seq ID No. 859: Amino acid sequence for Thermobrachium celere glucosidase, Uniparc reference UPI00033420CB, Uniprot reference R7RMQ6.
[0977] Seq ID No. 860: Amino acid sequence for Drechslerella stenobrocha glucosidase, Uniparc reference UPI0003EA65B9, Uniprot reference W7HT93.
[0978] Seq ID No. 861: Amino acid sequence for Bifidobacterium minimum glucosidase, Uniparc reference UPI0003B38542, Uniprot reference A0A087BMR5.
[0979] Seq ID No. 862: Amino acid sequence for Bifidobacterium thermacidophilum glucosidase, Uniparc reference UPI000409825E, Uniprot reference A0A087E3K8.
[0980] Seq ID No. 863: Amino acid sequence for Verruconis gallopava glucosidase, Uniparc reference UPI0005C0229F, Uniprot reference A0A0D1X9G0.
[0981] Seq ID No. 864: Amino acid sequence for Stagonospora sp. glucosidase, Uniparc reference UPI0007CECAD5, Uniprot reference A0A178AER7.
[0982] Seq ID No. 865: Amino acid sequence for Firmicutes bacterium glucosidase, Uniparc reference UPI0009D58C49, Uniprot reference A0A1V6ALF9.
[0983] Seq ID No. 866: Amino acid sequence for Tuber borchii glucosidase, Uniparc reference UPI000D50EED1, Uniprot reference A0A2T6ZNU7.
[0984] Seq ID No. 867: Amino acid sequence for Morchella conica glucosidase, Uniparc reference UPI000F728167, Uniprot reference A0A3N4KUR3.
[0985] Seq ID No. 868: Amino acid sequence for Dictyoglomus thermophilum glucosidase, Uniparc reference UPI00018152EB, Uniprot reference B5YC96.
[0986] Seq ID No. 869: Amino acid sequence for Microlunatus phosphovorus glucosidase, Uniparc reference UPI000210C01C, Uniprot reference F5XL24.
[0987] Seq ID No. 870: Amino acid sequence for Bifidobacterium asteroides glucosidase, Uniparc reference UPI00028BB1B6, Uniprot reference K4IPD2.
[0988] Seq ID No. 871: Amino acid sequence for Dactylellina haptotyla glucosidase, Uniparc reference UPI00035AE576, Uniprot reference S8BQ60.
[0989] Seq ID No. 872: Amino acid sequence for Fusarium oxysporum glucosidase, Uniparc reference UPI0003F2D7DD, Uniprot reference W9JF54.
[0990] Seq ID No. 873: Amino acid sequence for Bifidobacterium longum glucosidase, Uniparc reference UPI0005067FF9, Uniprot reference A0A087BRY2.
[0991] Seq ID No. 874: Amino acid sequence for Bifidobacterium tsurumiense glucosidase, Uniparc reference UPI0004105550, Uniprot reference A0A087EK01.
[0992] Seq ID No. 875: Amino acid sequence for Exophiala spinifera glucosidase, Uniparc reference UPI0005BF9DF9, Uniprot reference A0A0D1YG50.
[0993] Seq ID No. 876: Amino acid sequence for Pyrenochaeta sp. glucosidase, Uniparc reference UPI0007CE7DBA, Uniprot reference A0A178E5I1.
[0994] Seq ID No. 877: Amino acid sequence for Firmicutes bacterium glucosidase, Uniparc reference UPI0009CDA3F1, Uniprot reference A0A1V6FLK2.
[0995] Seq ID No. 878: Amino acid sequence for Cadophora sp. glucosidase, Uniparc reference UPI000D5A9E68, Uniprot reference A0A2V1B599.
[0996] Seq ID No. 879: Amino acid sequence for Morchella conica glucosidase, Uniparc reference UPI000F7330CD, Uniprot reference A0A3N4L4M3.
[0997] Seq ID No. 880: Amino acid sequence for Bifidobacterium animalis glucosidase, Uniparc reference UPI000189C68F, Uniprot reference B8DV42.
[0998] Seq ID No. 881: Amino acid sequence for Treponema azotonutricium glucosidase, Uniparc reference UPI00020ED2C9, Uniprot reference F5YGD5.
[0999] Seq ID No. 882: Amino acid sequence for Acidipropionibacterium acidipropionici glucosidase, Uniparc reference UPI0002988429, Uniprot reference K7S0E5.
[1000] Seq ID No. 883: Amino acid sequence for Salinispira pacifica glucosidase, Uniparc reference UPI0003D93613, Uniprot reference V5WNB6.
[1001] Seq ID No. 884: Amino acid sequence for Bifidobacterium mongoliense glucosidase, Uniparc reference UPI000503588E, Uniprot reference A0A087C760.
[1002] Seq ID No. 885: Amino acid sequence for Bifidobacterium indicum glucosidase, Uniparc reference UPI000499F5D1, Uniprot reference A0A087VUW4.
[1003] Seq ID No. 886: Amino acid sequence for Brachyspira suanatina glucosidase, Uniparc reference UPI000659257F, Uniprot reference A0A0G4K5C2.
[1004] Seq ID No. 887: Amino acid sequence for Phialocephala scopiformis glucosidase, Uniparc reference UPI0007F2FD44, Uniprot reference A0A194X8Q9.
[1005] Seq ID No. 888: Amino acid sequence for uncultured Microbacterium sp. glucosidase, Uniparc reference UPI000A2BB4A5, Uniprot reference A0A1Y5P895.
[1006] Seq ID No. 889: Amino acid sequence for Periconia macrospinosa glucosidase, Uniparc reference UPI000D5BC9BD, Uniprot reference A0A2V1E673.
[1007] Seq ID No. 890: Amino acid sequence for Arthrobacter ulcerisalmonis glucosidase, Uniparc reference UPI000F3DC30B, Uniprot reference A0A3P5WTE2.
[1008] Seq ID No. 891: Amino acid sequence for Pseudarthrobacter chlorophenolicus glucosidase, Uniparc reference UPI0001664880, Uniprot reference B8H9A2.
[1009] Seq ID No. 892: Amino acid sequence for Haloplasma contractile glucosidase, Uniparc reference UPI0002120C63, Uniprot reference F7PUF3.
[1010] Seq ID No. 893: Amino acid sequence for Cochliobolus heterostrophus glucosidase, Uniparc reference UPI0002B73341, Uniprot reference M2ULB2.
[1011] Seq ID No. 894: Amino acid sequence for Microbacterium sp. glucosidase, Uniparc reference UPI0003DE58EA, Uniprot reference W0Z818.
[1012] Seq ID No. 895: Codon optimised DNA encoding 6×His Bifidobacterium actinocoloniiforme glucosidase, Uniparc reference UPI000503B26C, Uniprot reference A0A086YYS8.
[1013] Seq ID No. 896: Codon optimised DNA encoding 6×His Bifidobacterium psychraerophilum glucosidase, Uniparc reference UPI000502B461, Uniprot reference A0A087CD28.
[1014] Seq ID No. 897: Codon optimised DNA encoding 6×His Penicillium italicum glucosidase, Uniparc reference UPI00052B8681, Uniprot reference A0A0A2K704.
[1015] Seq ID No. 898: Codon optimised DNA encoding 6×His Microbacterium trichothecenolyticum glucosidase, Uniparc reference UPI0005ED0AE6, Uniprot reference A0A0M2HDB3.
[1016] Seq ID No. 899: Codon optimised DNA encoding 6×His uncultured Clostridium sp. glucosidase, Uniparc reference UPI0008206F38, Uniprot reference A0A1C6I6A3.
[1017] Seq ID No. 900: Codon optimised DNA encoding 6×His Bifiguratus adelaidae glucosidase, Uniparc reference UPI000BC57319, Uniprot reference A0A261Y7Q8.
[1018] Seq ID No. 901: Codon optimised DNA encoding 6×His Paenibacillus thiaminolyticus glucosidase, Uniparc reference UPI000B3B73CD, Uniprot reference A0A378ZIK3.
[1019] Seq ID No. 902: Codon optimised DNA encoding 6×His Microbacterium lemovicicum glucosidase, Uniparc reference UPI000F8FB9BA, Uniprot reference A0A3S9WE68.
[1020] Seq ID No. 903: Codon optimised DNA encoding 6×His Rhodococcus erythropolis glucosidase, Uniparc reference UPI00019923DC, Uniprot reference C1A1N4.
[1021] Seq ID No. 904: Codon optimised DNA encoding 6×His Cutibacterium avidum glucosidase, Uniparc reference UPI00022C19B5, Uniprot reference G4CZU8.
[1022] Seq ID No. 905: Codon optimised DNA encoding 6×His Clavibacter michiganensis glucosidase, Uniparc reference UPI0002C5A938, Uniprot reference M5BD10.
[1023] Seq ID No. 906: Codon optimised DNA encoding 6×His Microbacterium sp. glucosidase, Uniparc reference UPI0003DE3509, Uniprot reference W0ZC23.
[1024] Seq ID No. 907: Codon optimised DNA encoding 6×His Bifidobacterium actinocoloniiforme glucosidase, Uniparc reference UPI000507F38A, Uniprot reference A0A086YZL4.
[1025] Seq ID No. 908: Codon optimised DNA encoding 6×His Bifidobacterium reuteri glucosidase, Uniparc reference UPI000506119A, Uniprot reference A0A087CR26.
[1026] Seq ID No. 909: Codon optimised DNA encoding 6×His Propionibacterium freudenreichii glucosidase, Uniparc reference UPI0005A5CAC2, Uniprot reference A0A0A8RX48.
[1027] Seq ID No. 910: Codon optimised DNA encoding 6×His Microbacterium hydrocarbonoxydans glucosidase, Uniparc reference UPI0005EC18F9, Uniprot reference A0A0M2HRU0.
[1028] Seq ID No. 911: Codon optimised DNA encoding 6×His Pseudonocardia sp. glucosidase, Uniparc reference UPI00094B6D3B, Uniprot reference A0A1Q8KSV8.
[1029] Seq ID No. 912: Codon optimised DNA encoding 6×His Tuber aestivum glucosidase, Uniparc reference UPI000BC13DF0, Uniprot reference A0A292PKV5.
[1030] Seq ID No. 913: Codon optimised DNA encoding 6×His Propionibacterium australiense glucosidase, Uniparc reference UPI000E5B4EA5, Uniprot reference A0A383S7A9.
[1031] Seq ID No. 914: Codon optimised DNA encoding 6×His Fusarium sp. glucosidase, Uniparc reference UPI001004B2C9, Uniprot reference A0A428T6E2.
[1032] Seq ID No. 915: Codon optimised DNA encoding 6×His Nectria haematococca glucosidase, Uniparc reference UPI0001B69B5C, Uniprot reference C7ZBV0.
[1033] Seq ID No. 916: Codon optimised DNA encoding 6×His Actinoplanes sp. glucosidase, Uniparc reference UPI00023EBB15, Uniprot reference G8S3E7.
[1034] Seq ID No. 917: Codon optimised DNA encoding 6×His Streptomyces fulvissimus glucosidase, Uniparc reference UPI0003289BC6, Uniprot reference N0CMW2.
[1035] Seq ID No. 918: Codon optimised DNA encoding 6×His Pestalotiopsis fici glucosidase, Uniparc reference UPI0003E02BF1, Uniprot reference W3WXF1.
[1036] Seq ID No. 919: Codon optimised DNA encoding 6×His Bifidobacterium bohemicum glucosidase, Uniparc reference UPI0005025F2E, Uniprot reference A0A086ZGP0.
[1037] Seq ID No. 920: Codon optimised DNA encoding 6×His Bifidobacterium saeculare glucosidase, Uniparc reference UPI0005084E52, Uniprot reference A0A087D0Q2.
[1038] Seq ID No. 921: Codon optimised DNA encoding 6×His Bionectria ochroleuca glucosidase, Uniparc reference UPI00059674D6, Uniprot reference A0A0B7JW24.
[1039] Seq ID No. 922: Codon optimised DNA encoding 6×His Bifidobacterium pseudocatenulatum glucosidase, Uniparc reference UPI0006C6D6F9, Uniprot reference A0A174AU04.
[1040] Seq ID No. 923: Codon optimised DNA encoding 6×His Pseudonocardia sp. glucosidase, Uniparc reference UPI00094ABAB3, Uniprot reference A0A1Q8LPB4.
[1041] Seq ID No. 924: Codon optimised DNA encoding 6×His bacterium glucosidase, Uniparc reference UPI000CB49A0B, Uniprot reference A0A2H5Z8Q4.
[1042] Seq ID No. 925: Codon optimised DNA encoding 6×His Coleophoma crateriformis glucosidase, Uniparc reference UPI000E38A995, Uniprot reference A0A3D8Q771.
[1043] Seq ID No. 926: Codon optimised DNA encoding 6×His Arthrobotrys oligospora glucosidase, Uniparc reference UPI001102DFA3, Uniprot reference A0A4Z0Y5Y8.
[1044] Seq ID No. 927: Codon optimised DNA encoding 6×His Pyrenophora teres glucosidase, Uniparc reference UPI0001ECDCBD, Uniprot reference E3RFS2.
[1045] Seq ID No. 928: Codon optimised DNA encoding 6×His Gordonia polyisoprenivorans glucosidase, Uniparc reference UPI00024F2A26, Uniprot reference H6MTQ7.
[1046] Seq ID No. 929: Codon optimised DNA encoding 6×His Stigmatella aurantiaca glucosidase, Uniparc reference UPI0000E28E5D, Uniprot reference Q08521.
[1047] Seq ID No. 930: Codon optimised DNA encoding 6×His Pestalotiopsis fici glucosidase, Uniparc reference UPI0003E03A52, Uniprot reference W3WZ03.
[1048] Seq ID No. 931: Codon optimised DNA encoding 6×His Bifidobacterium magnum glucosidase, Uniparc reference UPI0003B7B6EE, Uniprot reference A0A087BEN9.
[1049] Seq ID No. 932: Codon optimised DNA encoding 6×His Bifidobacterium stellenboschense glucosidase, Uniparc reference UPI000503F283, Uniprot reference A0A087DFL8.
[1050] Seq ID No. 933: Codon optimised DNA encoding 6×His Bionectria ochroleuca glucosidase, Uniparc reference UPI00059673EE, Uniprot reference A0A0B7K316.
[1051] Seq ID No. 934: Codon optimised DNA encoding 6×His Hungatella hathewayi glucosidase, Uniparc reference UPI0006C069F3, Uniprot reference A0A174LVE3.
[1052] Seq ID No. 935: Codon optimised DNA encoding 6×His Mycetocola reblochoni glucosidase, Uniparc reference UPI00097EB800, Uniprot reference A0A1R4J2F9.
[1053] Seq ID No. 936: Codon optimised DNA encoding 6×His Nonomuraea sp. glucosidase, Uniparc reference UPI0009ABD7B3, Uniprot reference A0A2P9IX34.
[1054] Seq ID No. 937: Codon optimised DNA encoding 6×His Coleophoma crateriformis glucosidase, Uniparc reference UPI000E391DF6, Uniprot reference A0A3D8T9C2.
[1055] Seq ID No. 938: Codon optimised DNA encoding 6×His Paenarthrobacter aurescens glucosidase, Uniparc reference UPI0000EC83AE, Uniprot reference A1R2K1.
[1056] Seq ID No. 939: Codon optimised DNA encoding 6×His Kitasatospora setae glucosidase, Uniparc reference UPI0001F21F08, Uniprot reference E4N4F6.
[1057] Seq ID No. 940: Codon optimised DNA encoding 6×His Nocardiopsis alba glucosidase, Uniparc reference UPI00027E251E, Uniprot reference J7L3Z8.
[1058] Seq ID No. 941: Codon optimised DNA encoding 6×His Rhodococcus jostii glucosidase, Uniparc reference UPI0000DBA338, Uniprot reference Q05014.
[1059] Seq ID No. 942: Codon optimised DNA encoding 6×His uncultured microorganism glucosidase, Uniparc reference UPI0003EC942D, Uniprot reference W5X324.
[1060] Seq ID No. 943: Codon optimised DNA encoding 6×His Bifidobacterium merycicum glucosidase, Uniparc reference UPI0005084B63, Uniprot reference A0A087BJ88.
[1061] Seq ID No. 944: Codon optimised DNA encoding 6×His Bifidobacterium scardovii glucosidase, Uniparc reference UPI0005018B5B, Uniprot reference A0A087DGT3.
[1062] Seq ID No. 945: Codon optimised DNA encoding 6×His Fusarium oxysporum glucosidase, Uniparc reference UPI00021EC81E, Uniprot reference A0A0C4DJL4.
[1063] Seq ID No. 946: Codon optimised DNA encoding 6×His Paraphaeosphaeria sporulosa glucosidase, Uniparc reference UPI0007CE199C, Uniprot reference A0A177BXH1.
[1064] Seq ID No. 947: Codon optimised DNA encoding 6×His Clostridium oryzae glucosidase, Uniparc reference UPI0009A50F8D, Uniprot reference A0A1V4IY77.
[1065] Seq ID No. 948: Codon optimised DNA encoding 6×His Corynespora cassiicola glucosidase, Uniparc reference UPI000D22F5EB, Uniprot reference A0A2T2N4T6.
[1066] Seq ID No. 949: Codon optimised DNA encoding 6×His Choiromyces venosus glucosidase, Uniparc reference UPI000F7332F8, Uniprot reference A0A3N4J9R6.
[1067] Seq ID No. 950: Codon optimised DNA encoding 6×His Saccharopolyspora erythraea glucosidase, Uniparc reference UPI0000F550EC, Uniprot reference A4F982.
[1068] Seq ID No. 951: Codon optimised DNA encoding 6×His Streptomyces venezuelae glucosidase, Uniparc reference UPI000204906E, Uniprot reference F2R0Y2.
[1069] Seq ID No. 952: Codon optimised DNA encoding 6×His Arthrobacter sp. glucosidase, Uniparc reference UPI00027DFDB0, Uniprot reference J7LVB1.
[1070] Seq ID No. 953: Codon optimised DNA encoding 6×His Thermobrachium celere glucosidase, Uniparc reference UPI00033420CB, Uniprot reference R7RMQ6.
[1071] Seq ID No. 954: Codon optimised DNA encoding 6×His Drechslerella stenobrocha glucosidase, Uniparc reference UPI0003EA65B9, Uniprot reference W7HT93.
[1072] Seq ID No. 955: Codon optimised DNA encoding 6×His Bifidobacterium minimum glucosidase, Uniparc reference UPI0003B38542, Uniprot reference A0A087BMR5.
[1073] Seq ID No. 956: Codon optimised DNA encoding 6×His Bifidobacterium thermacidophilum glucosidase, Uniparc reference UPI000409825E, Uniprot reference A0A087E3K8.
[1074] Seq ID No. 957: Codon optimised DNA encoding 6×His Verruconis gallopava glucosidase, Uniparc reference UPI0005C0229F, Uniprot reference A0A0D1X9G0.
[1075] Seq ID No. 958: Codon optimised DNA encoding 6×His Stagonospora sp. glucosidase, Uniparc reference UPI0007CECAD5, Uniprot reference A0A178AER7.
[1076] Seq ID No. 959: Codon optimised DNA encoding 6×His Firmicutes bacterium glucosidase, Uniparc reference UPI0009D58C49, Uniprot reference A0A1V6ALF9.
[1077] Seq ID No. 960: Codon optimised DNA encoding 6×His Tuber borchii glucosidase, Uniparc reference UPI000D50EED1, Uniprot reference A0A2T6ZNU7.
[1078] Seq ID No. 961: Codon optimised DNA encoding 6×His Morchella conica glucosidase, Uniparc reference UPI000F728167, Uniprot reference A0A3N4KUR3.
[1079] Seq ID No. 962: Codon optimised DNA encoding 6×His Dictyoglomus thermophilum glucosidase, Uniparc reference UPI00018152EB, Uniprot reference B5YC96.
[1080] Seq ID No. 963: Codon optimised DNA encoding 6×His Microlunatus phosphovorus glucosidase, Uniparc reference UPI000210C01C, Uniprot reference F5XL24.
[1081] Seq ID No. 964: Codon optimised DNA encoding 6×His Bifidobacterium asteroides glucosidase, Uniparc reference UPI00028BB1B6, Uniprot reference K4IPD2.
[1082] Seq ID No. 965: Codon optimised DNA encoding 6×His Dactylellina haptotyla glucosidase, Uniparc reference UPI00035AE576, Uniprot reference S8BQ60.
[1083] Seq ID No. 966: Codon optimised DNA encoding 6×His Fusarium oxysporum glucosidase, Uniparc reference UPI0003F2D7DD, Uniprot reference W9JF54.
[1084] Seq ID No. 967: Codon optimised DNA encoding 6×His Bifidobacterium longum glucosidase, Uniparc reference UPI0005067FF9, Uniprot reference A0A087BRY2.
[1085] Seq ID No. 968: Codon optimised DNA encoding 6×His Bifidobacterium tsurumiense glucosidase, Uniparc reference UPI0004105550, Uniprot reference A0A087EK01.
[1086] Seq ID No. 969: Codon optimised DNA encoding 6×His Exophiala spinifera glucosidase, Uniparc reference UPI0005BF9DF9, Uniprot reference A0A0D1YG50.
[1087] Seq ID No. 970: Codon optimised DNA encoding 6×His Pyrenochaeta sp. glucosidase, Uniparc reference UPI0007CE7DBA, Uniprot reference A0A178E5I1.
[1088] Seq ID No. 971: Codon optimised DNA encoding 6×His Firmicutes bacterium glucosidase, Uniparc reference UPI0009CDA3F1, Uniprot reference A0A1V6FLK2.
[1089] Seq ID No. 972: Codon optimised DNA encoding 6×His Cadophora sp. glucosidase, Uniparc reference UPI000D5A9E68, Uniprot reference A0A2V1B599.
[1090] Seq ID No. 973: Codon optimised DNA encoding 6×His Morchella conica glucosidase, Uniparc reference UPI000F7330CD, Uniprot reference A0A3N4L4M3.
[1091] Seq ID No. 974: Codon optimised DNA encoding 6×His Bifidobacterium animalis glucosidase, Uniparc reference UPI000189C68F, Uniprot reference B8DV42.
[1092] Seq ID No. 975: Codon optimised DNA encoding 6×His Treponema azotonutricium glucosidase, Uniparc reference UPI00020ED2C9, Uniprot reference F5YGD5.
[1093] Seq ID No. 976: Codon optimised DNA encoding 6×His Acidipropionibacterium acidipropionici glucosidase, Uniparc reference UPI0002988429, Uniprot reference K7S0E5.
[1094] Seq ID No. 977: Codon optimised DNA encoding 6×His Salinispira pacifica glucosidase, Uniparc reference UPI0003D93613, Uniprot reference V5WNB6.
[1095] Seq ID No. 978: Codon optimised DNA encoding 6×His Bifidobacterium mongoliense glucosidase, Uniparc reference UPI000503588E, Uniprot reference A0A087C760.
[1096] Seq ID No. 979: Codon optimised DNA encoding 6×His Bifidobacterium indicum glucosidase, Uniparc reference UPI000499F5D1, Uniprot reference A0A087VUW4.
[1097] Seq ID No. 980: Codon optimised DNA encoding 6×His Brachyspira suanatina glucosidase, Uniparc reference UPI000659257F, Uniprot reference A0A0G4K5C2.
[1098] Seq ID No. 981: Codon optimised DNA encoding 6×His Phialocephala scopiformis glucosidase, Uniparc reference UPI0007F2FD44, Uniprot reference A0A194X8Q9.
[1099] Seq ID No. 982: Codon optimised DNA encoding 6×His uncultured Microbacterium sp. glucosidase, Uniparc reference UPI000A2BB4A5, Uniprot reference A0A1Y5P895.
[1100] Seq ID No. 983: Codon optimised DNA encoding 6×His Periconia macrospinosa glucosidase, Uniparc reference UPI000D5BC9BD, Uniprot reference A0A2V1E673.
[1101] Seq ID No. 984: Codon optimised DNA encoding 6×His Arthrobacter ulcerisalmonis glucosidase, Uniparc reference UPI000F3DC30B, Uniprot reference A0A3P5WTE2.
[1102] Seq ID No. 985: Codon optimised DNA encoding 6×His Pseudarthrobacter chlorophenolicus glucosidase, Uniparc reference UPI0001664880, Uniprot reference B8H9A2.
[1103] Seq ID No. 986: Codon optimised DNA encoding 6×His Haloplasma contractile glucosidase, Uniparc reference UPI0002120C63, Uniprot reference F7PUF3.
[1104] Seq ID No. 987: Codon optimised DNA encoding 6×His Cochliobolus heterostrophus glucosidase, Uniparc reference UPI0002B73341, Uniprot reference M2ULB2.
[1105] Seq ID No. 988: Codon optimised DNA encoding 6×His Microbacterium sp. glucosidase, Uniparc reference UPI0003DE58EA, Uniprot reference W0Z818.
[1106] Seq ID No. 989: Amino acid sequence for Rhodothermus marinus rhamnosidase, Uniparc reference UPI0001A31108, Uniprot reference D0MFR0.
[1107] Seq ID No. 990: Amino acid sequence for Streptomyces bingchenggensis rhamnosidase, Uniparc reference UPI0001D90BFE, Uniprot reference D7C463.
[1108] Seq ID No. 991: Amino acid sequence for Spirosoma linguale rhamnosidase, Uniparc reference UPI0001A3AEAC, Uniprot reference D2QL60.
[1109] Seq ID No. 992: Amino acid sequence for Roseburia intestinalis rhamnosidase, Uniparc reference UPI0001CD6D48, Uniprot reference D4L2K8.
[1110] Seq ID No. 993: Amino acid sequence for Draconibacterium orientale rhamnosidase, Uniparc reference UPI000442EF22, Uniprot reference X5DG83.
[1111] Seq ID No. 994: Amino acid sequence for Catenulispora acidiphila rhamnosidase, Uniparc reference UPI00019E052B, Uniprot reference C7QC24.
[1112] Seq ID No. 995: Amino acid sequence for Bacteroides thetaiotaomicron rhamnosidase, Uniparc reference UPI000005ADE1, Uniprot reference Q8A916.
[1113] Seq ID No. 996: Amino acid sequence for Opitutus terrae rhamnosidase, Uniparc reference UPI000172B2E3, Uniprot reference B1ZRE4.
[1114] Seq ID No. 997: Amino acid sequence for Lachnoclostridium phytofermentans rhamnosidase, Uniparc reference UPI00015FE0BE, Uniprot reference A9KJP8.
[1115] Seq ID No. 998: Amino acid sequence for Rhodanobacter denitrificans rhamnosidase, Uniparc reference UPI00022DA3ED, Uniprot reference M4NH01.
[1116] Seq ID No. 999: Amino acid sequence for Prevotella ruminicola rhamnosidase, Uniparc reference UPI0001D07633, Uniprot reference D5ETD9.
[1117] Seq ID No. 1000: Amino acid sequence for Aspergillus terreus rhamnosidase, Uniparc reference UPI000259E388, Uniprot reference I0AZ41.
[1118] Seq ID No. 1001: Amino acid sequence for Brachybacterium faecium rhamnosidase, Uniparc reference UPI0001A461B6, Uniprot reference C7MA58.
[1119] Seq ID No. 1002: Amino acid sequence for Flavobacterium johnsoniae rhamnosidase, Uniparc reference UPI00006E4A0D, Uniprot reference A5FCH3.
[1120] Seq ID No. 1003: Amino acid sequence for Rahnella aquatilis rhamnosidase, Uniparc reference UPI000245C507, Uniprot reference H2IYR2.
[1121] Seq ID No. 1004: Amino acid sequence for Bifidobacterium moukalabense rhamnosidase, Uniparc reference UPI0003E4E711, Uniprot reference W4N6H0.
[1122] Seq ID No. 1005: Amino acid sequence for Enterococcus casseliflavus rhamnosidase, Uniparc reference UPI000353BD9F, Uniprot reference S4BBS9.
[1123] Seq ID No. 1006: Amino acid sequence for Geobacillus sp. rhamnosidase, Uniparc reference UPI0001789C0D, Uniprot reference D3EED1.
[1124] Seq ID No. 1007: Amino acid sequence for Modestobacter marinus rhamnosidase, Uniparc reference UPI000260A2FE, Uniprot reference I4EYD9.
[1125] Seq ID No. 1008: Amino acid sequence for Pedobacter heparinus rhamnosidase, Uniparc reference UPI00019EF0EE, Uniprot reference C6XYM6.
[1126] Seq ID No. 1009: Amino acid sequence for Dyadobacter fermentans rhamnosidase, Uniparc reference UPI00019B5915, Uniprot reference C6VZL3.
[1127] Seq ID No. 1010: Amino acid sequence for Paenibacillus mucilaginosus rhamnosidase, Uniparc reference UPI000212C156, Uniprot reference F8FQQ3.
[1128] Seq ID No. 1011: Amino acid sequence for Paenibacillus sp. rhamnosidase, Uniparc reference UPI0003E2544D, Uniprot reference W4D866.
[1129] Seq ID No. 1012: Amino acid sequence for Bacteroides thetaiotaomicron rhamnosidase, Uniparc reference UPI000005ADD2, Uniprot reference A0A0P0FM19.
[1130] Seq ID No. 1013: Amino acid sequence for Chloroflexus aurantiacus rhamnosidase, Uniparc reference UPI00005BA60B, Uniprot reference A9WDK5.
[1131] Seq ID No. 1014: Amino acid sequence for Thermoclostridium stercorarium rhamnosidase, Uniparc reference UPI00000B098C, Uniprot reference Q9S3L0.
[1132] Seq ID No. 1015: Amino acid sequence for Bifidobacterium moukalabense rhamnosidase, Uniparc reference UPI0003E5C314, Uniprot reference W4N612.
[1133] Seq ID No. 1016: Amino acid sequence for Olsenella profusa rhamnosidase, Uniparc reference UPI0003AE032C, Uniprot reference U2USP4.
[1134] Seq ID No. 1017: Amino acid sequence for Kribbella flavida rhamnosidase, Uniparc reference UPI00019BDB13, Uniprot reference D2PMT5.
[1135] Seq ID No. 1018: Amino acid sequence for Caulobacter vibrioides rhamnosidase, Uniparc reference UPI00000C7226, Uniprot reference Q9A9K2.
[1136] Seq ID No. 1019: Amino acid sequence for Bacteroides thetaiotaomicron rhamnosidase, Uniparc reference UPI000005BA09, Uniprot reference Q8A076.
[1137] Seq ID No. 1020: Amino acid sequence for Rhodonellum psychrophilum rhamnosidase, Uniparc reference UPI0003745394, Uniprot reference U5BUY4.
[1138] Seq ID No. 1021: Amino acid sequence for Paenibacillus sp. rhamnosidase, Uniparc reference UPI0004F6D660, Uniprot reference A0A089M3T2.
[1139] Seq ID No. 1022: Amino acid sequence for Catenovulum agarivorans rhamnosidase, Uniparc reference UPI0003ED860D, Uniprot reference W7QMH5.
[1140] Seq ID No. 1023: Amino acid sequence for Zobellia galactanivorans rhamnosidase, Uniparc reference UPI000217D8B1, Uniprot reference G0L382.
[1141] Seq ID No. 1024: Amino acid sequence for Bacteroides thetaiotaomicron rhamnosidase, Uniparc reference UPI000005B845, Uniprot reference Q8A1H5.
[1142] Seq ID No. 1025: Amino acid sequence for Bacteroides xylanisolvens rhamnosidase, Uniparc reference UPI0001CD02E9, Uniprot reference D6CYE5.
[1143] Seq ID No. 1026: Amino acid sequence for Pseudarthrobacter chlorophenolicus rhamnosidase, Uniparc reference UPI00018E07C6, Uniprot reference B8HAH3.
[1144] Seq ID No. 1027: Amino acid sequence for Dictyoglomus thermophilum rhamnosidase, Uniparc reference UPI0001815896, Uniprot reference B5YC64.
[1145] Seq ID No. 1028: Amino acid sequence for Formosa agariphila rhamnosidase, Uniparc reference UPI00039231C1, Uniprot reference T2KPL4.
[1146] Seq ID No. 1029: Amino acid sequence for Rhodococcus jostii rhamnosidase, Uniparc reference UPI0000DBA6EB, Uniprot reference Q0S9T4.
[1147] Seq ID No. 1030: Amino acid sequence for Lactobacillus crispatus rhamnosidase, Uniparc reference UPI0001D10896, Uniprot reference D5GZ45.
[1148] Seq ID No. 1031: Amino acid sequence for Pedobacter heparinus rhamnosidase, Uniparc reference UPI0001B17DE6, Uniprot reference C6XVU2.
[1149] Seq ID No. 1032: Amino acid sequence for Spirosoma linguale rhamnosidase, Uniparc reference UPI0001A3C989, Uniprot reference D2QUA5.
[1150] Seq ID No. 1033: Amino acid sequence for Pedobacter heparinus rhamnosidase, Uniparc reference UPI00019EE3EB, Uniprot reference C6XU05.
[1151] Seq ID No. 1034: Amino acid sequence for Paenibacillus mucilaginosus rhamnosidase, Uniparc reference UPI0003432C11, Uniprot reference R9ULQ4.
[1152] Seq ID No. 1035: Amino acid sequence for Caulobacter segnis rhamnosidase, Uniparc reference UPI0001BC0C05, Uniprot reference D5VGD9.
[1153] Seq ID No. 1036: Amino acid sequence for Bacteroides cellulosilyticus rhamnosidase, Uniparc reference UPI0001969377, Uniprot reference E2N9B1.
[1154] Seq ID No. 1037: Amino acid sequence for Pedobacter heparinus rhamnosidase, Uniparc reference UPI0001B17C60, Uniprot reference C6Y153.
[1155] Seq ID No. 1038: Amino acid sequence for Formosa agariphila rhamnosidase, Uniparc reference UPI000571C0C2, Uniprot reference T2KNB2.
[1156] Seq ID No. 1039: Amino acid sequence for Lactobacillus acidophilus rhamnosidase, Uniparc reference UPI00004C6D41, Uniprot reference Q5FJ31.
[1157] Seq ID No. 1040: Amino acid sequence for Rhodopirellula baltica rhamnosidase, Uniparc reference UPI00001AC07D, Uniprot reference Q7UYD5.
[1158] Seq ID No. 1041: Amino acid sequence for Frankia inefficax rhamnosidase, Uniparc reference UPI0001BF9A6C, Uniprot reference E3IY10.
[1159] Seq ID No. 1042: Amino acid sequence for Streptomyces scabiei rhamnosidase, Uniparc reference UPI0001B7FF91, Uniprot reference C9Z376.
[1160] Seq ID No. 1043: Amino acid sequence for Flavobacterium johnsoniae rhamnosidase, Uniparc reference UPI00006E5F74, Uniprot reference A5FC22.
[1161] Seq ID No. 1044: Amino acid sequence for Streptomyces sp. rhamnosidase, Uniparc reference UPI00034E666D, Uniprot reference S2YWB5.
[1162] Seq ID No. 1045: Amino acid sequence for Acidobacterium capsulatum rhamnosidase, Uniparc reference UPI000198DF25, Uniprot reference C1F149.
[1163] Seq ID No. 1046: Amino acid sequence for Catenovulum agarivorans rhamnosidase, Uniparc reference UPI0003ED82D3, Uniprot reference W7QYP5.
[1164] Seq ID No. 1047: Amino acid sequence for Brachybacterium faecium rhamnosidase, Uniparc reference UPI0001A461B7, Uniprot reference C7MA59.
[1165] Seq ID No. 1048: Amino acid sequence for Klebsiella oxytoca rhamnosidase, Uniparc reference UPI000243A177, Uniprot reference A0A0J9X262.
[1166] Seq ID No. 1049: Amino acid sequence for Chitinophaga pinensis rhamnosidase, Uniparc reference UPI0001B24769, Uniprot reference C7PA70.
[1167] Seq ID No. 1050: Amino acid sequence for Streptomyces bottropensis rhamnosidase, Uniparc reference UPI0002BCAF6B, Uniprot reference M3FYL9.
[1168] Seq ID No. 1051: Amino acid sequence for Subdoligranulum variabile rhamnosidase, Uniparc reference UPI0001966B28, Uniprot reference D1PKC7.
[1169] Seq ID No. 1052: Amino acid sequence for Microbacterium testaceum rhamnosidase, Uniparc reference UPI0001F8A51D, Uniprot reference E8NDD8.
[1170] Seq ID No. 1053: Amino acid sequence for Solibacter usitatus rhamnosidase, Uniparc reference UPI000053767B, Uniprot reference Q01V09.
[1171] Seq ID No. 1054: Amino acid sequence for Streptosporangium roseum rhamnosidase, Uniparc reference UPI0001A3EFE6, Uniprot reference D2B240.
[1172] Seq ID No. 1055: Amino acid sequence for alpha proteobacterium rhamnosidase, Uniparc reference UPI0006CE1E82, Uniprot reference A0A0N1BME3.
[1173] Seq ID No. 1056: Amino acid sequence for Solitalea canadensis rhamnosidase, Uniparc reference UPI000247229E, Uniprot reference H8KPI7.
[1174] Seq ID No. 1057: Amino acid sequence for Parabacteroides goldsteinii rhamnosidase, Uniparc reference UPI0002CB9583, Uniprot reference S0GSF0.
[1175] Seq ID No. 1058: Amino acid sequence for Cyclobacterium marinum rhamnosidase, Uniparc reference UPI00021B9B33, Uniprot reference G0J630.
[1176] Seq ID No. 1059: Amino acid sequence for Solibacter usitatus rhamnosidase, Uniparc reference UPI0000533669, Uniprot reference Q01TX2.
[1177] Seq ID No. 1060: Amino acid sequence for Lunatimonas lonarensis rhamnosidase, Uniparc reference UPI00032D8F6D, Uniprot reference R7ZW70.
[1178] Seq ID No. 1061: Amino acid sequence for Rhizobium leguminosarum rhamnosidase, Uniparc reference UPI0000D713F2, Uniprot reference Q1M7P3.
[1179] Seq ID No. 1062: Amino acid sequence for Streptosporangium roseum rhamnosidase, Uniparc reference UPI0001A3EBEB, Uniprot reference D2AYU9.
[1180] Seq ID No. 1063: Amino acid sequence for Parabacteroides distasonis rhamnosidase, Uniparc reference UPI000156F115, Uniprot reference A6LBL4.
[1181] Seq ID No. 1064: Amino acid sequence for Lachnospiraceae bacterium rhamnosidase, Uniparc reference UPI0003375A10, Uniprot reference R9K6L6.
[1182] Seq ID No. 1065: Amino acid sequence for Chitinophaga pinensis rhamnosidase, Uniparc reference UPI0001A2F0FA, Uniprot reference C7P9Y8.
[1183] Seq ID No. 1066: Amino acid sequence for Caulobacter segnis rhamnosidase, Uniparc reference UPI0001B00015, Uniprot reference D5VGC3.
[1184] Seq ID No. 1067: Amino acid sequence for Pedobacter heparinus rhamnosidase, Uniparc reference UPI00019EF6E1, Uniprot reference C6Y145.
[1185] Seq ID No. 1068: Amino acid sequence for Pedobacter heparinus rhamnosidase, Uniparc reference UPI00019EE1A9, Uniprot reference C6Y2X3.
[1186] Seq ID No. 1069: Amino acid sequence for Deltaproteobacteria bacterium rhamnosidase, Uniparc reference UPI000C8D4928, Uniprot reference A0A2D5SK32.
[1187] Seq ID No. 1070: Amino acid sequence for Thermobaculum terrenum rhamnosidase, Uniparc reference UPI00019BFDCE, Uniprot reference D1CHL4.
[1188] Seq ID No. 1071: Amino acid sequence for Opitutus terrae rhamnosidase, Uniparc reference UPI000172B62A, Uniprot reference B1ZY35.
[1189] Seq ID No. 1072: Amino acid sequence for Kribbella flavida rhamnosidase, Uniparc reference UPI00019BFABB, Uniprot reference D2PXQ4.
[1190] Seq ID No. 1073: Amino acid sequence for Streptomyces scabiei rhamnosidase, Uniparc reference UPI0001B80091, Uniprot reference C9Z391.
[1191] Seq ID No. 1074: Amino acid sequence for Actinoplanes sp. rhamnosidase, Uniparc reference UPI00023EC5D1, Uniprot reference G8S540.
[1192] Seq ID No. 1075: Amino acid sequence for Asticcacaulis sp. rhamnosidase, Uniparc reference UPI0003C3CD2B, Uniprot reference V4NSJ1.
[1193] Seq ID No. 1076: Amino acid sequence for Kribbella flavida rhamnosidase, Uniparc reference UPI00019BF65D, Uniprot reference D2PT74.
[1194] Seq ID No. 1077: Amino acid sequence for Bacillus sp. rhamnosidase, Uniparc reference UPI00000BC760, Uniprot reference Q93RE7.
[1195] Seq ID No. 1078: Amino acid sequence for Flavobacterium johnsoniae rhamnosidase, Uniparc reference UPI00006E5FAB, Uniprot reference A5FCG3.
[1196] Seq ID No. 1079: Amino acid sequence for Lunatimonas lonarensis rhamnosidase, Uniparc reference UPI00032EEB9C, Uniprot reference R7ZS84.
[1197] Seq ID No. 1080: Amino acid sequence for Eisenbergiella massiliensis rhamnosidase, Uniparc reference UPI0004B2D794, Uniprot reference A0A3E3IGR6.
[1198] Seq ID No. 1081: Amino acid sequence for Catenovulum agarivorans rhamnosidase, Uniparc reference UPI0003ED7515, Uniprot reference W7QF25.
[1199] Seq ID No. 1083: Codon optimised DNA encoding 6×His Rhodothermus marinus rhamnosidase, Uniparc reference UPI0001A31108, Uniprot reference D0MFR0.
[1200] Seq ID No. 1084: Codon optimised DNA encoding 6×His Streptomyces bingchenggensis rhamnosidase, Uniparc reference UPI0001D90BFE, Uniprot reference D7C463.
[1201] Seq ID No. 1085: Codon optimised DNA encoding 6×His Spirosoma linguale rhamnosidase, Uniparc reference UPI0001A3AEAC, Uniprot reference D2QL60.
[1202] Seq ID No. 1086: Codon optimised DNA encoding 6×His Roseburia intestinalis rhamnosidase, Uniparc reference UPI0001CD6D48, Uniprot reference D4L2K8.
[1203] Seq ID No. 1087: Codon optimised DNA encoding 6×His Draconibacterium orientale rhamnosidase, Uniparc reference UPI000442EF22, Uniprot reference X5DG83.
[1204] Seq ID No. 1088: Codon optimised DNA encoding 6×His Catenulispora acidiphila rhamnosidase, Uniparc reference UPI00019E052B, Uniprot reference C7QC24.
[1205] Seq ID No. 1089: Codon optimised DNA encoding 6×His Bacteroides thetaiotaomicron rhamnosidase, Uniparc reference UPI000005ADE1, Uniprot reference Q8A916.
[1206] Seq ID No. 1090: Codon optimised DNA encoding 6×His Opitutus terrae rhamnosidase, Uniparc reference UPI000172B2E3, Uniprot reference B1ZRE4.
[1207] Seq ID No. 1091: Codon optimised DNA encoding 6×His Lachnoclostridium phytofermentans rhamnosidase, Uniparc reference UPI00015FE0BE, Uniprot reference A9KJ P8.
[1208] Seq ID No. 1092: Codon optimised DNA encoding 6×His Rhodanobacter denitrificans rhamnosidase, Uniparc reference UPI00022DA3ED, Uniprot reference M4NH01.
[1209] Seq ID No. 1093: Codon optimised DNA encoding 6×His Prevotella ruminicola rhamnosidase, Uniparc reference UPI0001D07633, Uniprot reference D5ETD9.
[1210] Seq ID No. 1094: Codon optimised DNA encoding 6×His Aspergillus terreus rhamnosidase, Uniparc reference UPI000259E388, Uniprot reference I0AZ41.
[1211] Seq ID No. 1095: Codon optimised DNA encoding 6×His Brachybacterium faecium rhamnosidase, Uniparc reference UPI0001A461B6, Uniprot reference C7MA58.
[1212] Seq ID No. 1096: Codon optimised DNA encoding 6×His Flavobacterium johnsoniae rhamnosidase, Uniparc reference UPI00006E4A0D, Uniprot reference A5FCH3.
[1213] Seq ID No. 1097: Codon optimised DNA encoding 6×His Rahnella aquatilis rhamnosidase, Uniparc reference UPI000245C507, Uniprot reference H2IYR2.
[1214] Seq ID No. 1098: Codon optimised DNA encoding 6×His Bifidobacterium moukalabense rhamnosidase, Uniparc reference UPI0003E4E711, Uniprot reference W4N6H0.
[1215] Seq ID No. 1099: Codon optimised DNA encoding 6×His Enterococcus casseliflavus rhamnosidase, Uniparc reference UPI000353BD9F, Uniprot reference S4BBS9.
[1216] Seq ID No. 1100: Codon optimised DNA encoding 6×His Geobacillus sp. rhamnosidase, Uniparc reference UPI0001789C0D, Uniprot reference D3EED1.
[1217] Seq ID No. 1101: Codon optimised DNA encoding 6×His Modestobacter marinus rhamnosidase, Uniparc reference UPI000260A2FE, Uniprot reference I4EYD9.
[1218] Seq ID No. 1102: Codon optimised DNA encoding 6×His Pedobacter heparinus rhamnosidase, Uniparc reference UPI00019EF0EE, Uniprot reference C6XYM6.
[1219] Seq ID No. 1103: Codon optimised DNA encoding 6×His Dyadobacter fermentans rhamnosidase, Uniparc reference UPI00019B5915, Uniprot reference C6VZL3.
[1220] Seq ID No. 1104: Codon optimised DNA encoding 6×His Paenibacillus mucilaginosus rhamnosidase, Uniparc reference UPI000212C156, Uniprot reference F8FQQ3.
[1221] Seq ID No. 1105: Codon optimised DNA encoding 6×His Paenibacillus sp. rhamnosidase, Uniparc reference UPI0003E2544D, Uniprot reference W4D866.
[1222] Seq ID No. 1106: Codon optimised DNA encoding 6×His Bacteroides thetaiotaomicron rhamnosidase, Uniparc reference UPI000005ADD2, Uniprot reference A0A0P0FM19.
[1223] Seq ID No. 1107: Codon optimised DNA encoding 6×His Chloroflexus aurantiacus rhamnosidase, Uniparc reference UPI00005BA60B, Uniprot reference A9WDK5.
[1224] Seq ID No. 1108: Codon optimised DNA encoding 6×His Thermoclostridium stercorarium rhamnosidase, Uniparc reference UPI00000B098C, Uniprot reference Q9S3L0.
[1225] Seq ID No. 1109: Codon optimised DNA encoding 6×His Bifidobacterium moukalabense rhamnosidase, Uniparc reference UPI0003E5C314, Uniprot reference W4N6I2.
[1226] Seq ID No. 1110: Codon optimised DNA encoding 6×His Olsenella profusa rhamnosidase, Uniparc reference UPI0003AE032C, Uniprot reference U2USP4.
[1227] Seq ID No. 1111: Codon optimised DNA encoding 6×His Kribbella flavida rhamnosidase, Uniparc reference UPI00019BDB13, Uniprot reference D2PMT5.
[1228] Seq ID No. 1112: Codon optimised DNA encoding 6×His Caulobacter vibrioides rhamnosidase, Uniparc reference UPI00000C7226, Uniprot reference Q9A9K2.
[1229] Seq ID No. 1113: Codon optimised DNA encoding 6×His Bacteroides thetaiotaomicron rhamnosidase, Uniparc reference UPI000005BA09, Uniprot reference Q8A076.
[1230] Seq ID No. 1114: Codon optimised DNA encoding 6×His Rhodonellum psychrophilum rhamnosidase, Uniparc reference UPI0003745394, Uniprot reference U5BUY4.
[1231] Seq ID No. 1115: Codon optimised DNA encoding 6×His Paenibacillus sp. rhamnosidase, Uniparc reference UPI0004F6D660, Uniprot reference A0A089M3T2.
[1232] Seq ID No. 1116: Codon optimised DNA encoding 6×His Catenovulum agarivorans rhamnosidase, Uniparc reference UPI0003ED860D, Uniprot reference W7QMH5.
[1233] Seq ID No. 1117: Codon optimised DNA encoding 6×His Zobellia galactanivorans rhamnosidase, Uniparc reference UPI000217D8B1, Uniprot reference G0L382.
[1234] Seq ID No. 1118: Codon optimised DNA encoding 6×His Bacteroides thetaiotaomicron rhamnosidase, Uniparc reference UPI000005B845, Uniprot reference Q8A1H5.
[1235] Seq ID No. 1119: Codon optimised DNA encoding 6×His Bacteroides xylanisolvens rhamnosidase, Uniparc reference UPI0001CD02E9, Uniprot reference D6CYE5.
[1236] Seq ID No. 1120: Codon optimised DNA encoding 6×His Pseudarthrobacter chlorophenolicus rhamnosidase, Uniparc reference UPI00018E07C6, Uniprot reference B8HAH3.
[1237] Seq ID No. 1121: Codon optimised DNA encoding 6×His Dictyoglomus thermophilum rhamnosidase, Uniparc reference UPI0001815896, Uniprot reference B5YC64.
[1238] Seq ID No. 1122: Codon optimised DNA encoding 6×His Formosa agariphila rhamnosidase, Uniparc reference UPI00039231C1, Uniprot reference T2KPL4.
[1239] Seq ID No. 1123: Codon optimised DNA encoding 6×His Rhodococcus jostii rhamnosidase, Uniparc reference UPI0000DBA6EB, Uniprot reference Q0S9T4.
[1240] Seq ID No. 1124: Codon optimised DNA encoding 6×His Lactobacillus crispatus rhamnosidase, Uniparc reference UPI0001D10896, Uniprot reference D5GZ45.
[1241] Seq ID No. 1125: Codon optimised DNA encoding 6×His Pedobacter heparinus rhamnosidase, Uniparc reference UPI0001B17DE6, Uniprot reference C6XVU2.
[1242] Seq ID No. 1126: Codon optimised DNA encoding 6×His Spirosoma linguale rhamnosidase, Uniparc reference UPI0001A3C989, Uniprot reference D2QUA5.
[1243] Seq ID No. 1127: Codon optimised DNA encoding 6×His Pedobacter heparinus rhamnosidase, Uniparc reference UPI00019EE3EB, Uniprot reference C6XU05.
[1244] Seq ID No. 1128: Codon optimised DNA encoding 6×His Paenibacillus mucilaginosus rhamnosidase, Uniparc reference UPI0003432C11, Uniprot reference R9ULQ4.
[1245] Seq ID No. 1129: Codon optimised DNA encoding 6×His Caulobacter segnis rhamnosidase, Uniparc reference UPI0001BC0C05, Uniprot reference D5VGD9.
[1246] Seq ID No. 1130: Codon optimised DNA encoding 6×His Bacteroides cellulosilyticus rhamnosidase, Uniparc reference UPI0001969377, Uniprot reference E2N9B1.
[1247] Seq ID No. 1131: Codon optimised DNA encoding 6×His Pedobacter heparinus rhamnosidase, Uniparc reference UPI0001B17C60, Uniprot reference C6Y153.
[1248] Seq ID No. 1132: Codon optimised DNA encoding 6×His Formosa agariphila rhamnosidase, Uniparc reference UPI000571C0C2, Uniprot reference T2KNB2.
[1249] Seq ID No. 1133: Codon optimised DNA encoding 6×His Lactobacillus acidophilus rhamnosidase, Uniparc reference UPI00004C6D41, Uniprot reference Q5FJ31.
[1250] Seq ID No. 1134: Codon optimised DNA encoding 6×His Rhodopirellula baltica rhamnosidase, Uniparc reference UPI00001AC07D, Uniprot reference Q7UYD5.
[1251] Seq ID No. 1135: Codon optimised DNA encoding 6×His Frankia inefficax rhamnosidase, Uniparc reference UPI0001BF9A6C, Uniprot reference E3IY10.
[1252] Seq ID No. 1136: Codon optimised DNA encoding 6×His Streptomyces scabiei rhamnosidase, Uniparc reference UPI0001B7FF91, Uniprot reference C9Z376.
[1253] Seq ID No. 1137: Codon optimised DNA encoding 6×His Flavobacterium johnsoniae rhamnosidase, Uniparc reference UPI00006E5F74, Uniprot reference A5FC22.
[1254] Seq ID No. 1138: Codon optimised DNA encoding 6×His Streptomyces sp. rhamnosidase, Uniparc reference UPI00034E666D, Uniprot reference S2YWB5.
[1255] Seq ID No. 1139: Codon optimised DNA encoding 6×His Acidobacterium capsulatum rhamnosidase, Uniparc reference UPI000198DF25, Uniprot reference C1F149.
[1256] Seq ID No. 1140: Codon optimised DNA encoding 6×His Catenovulum agarivorans rhamnosidase, Uniparc reference UPI0003ED82D3, Uniprot reference W7QYP5.
[1257] Seq ID No. 1141: Codon optimised DNA encoding 6×His Brachybacterium faecium rhamnosidase, Uniparc reference UPI0001A461B7, Uniprot reference C7MA59.
[1258] Seq ID No. 1142: Codon optimised DNA encoding 6×His Klebsiella oxytoca rhamnosidase, Uniparc reference UPI000243A177, Uniprot reference A0A0J9X262.
[1259] Seq ID No. 1143: Codon optimised DNA encoding 6×His Chitinophaga pinensis rhamnosidase, Uniparc reference UPI0001B24769, Uniprot reference C7PA70.
[1260] Seq ID No. 1144: Codon optimised DNA encoding 6×His Streptomyces bottropensis rhamnosidase, Uniparc reference UPI0002BCAF6B, Uniprot reference M3FYL9.
[1261] Seq ID No. 1145: Codon optimised DNA encoding 6×His Subdoligranulum variabile rhamnosidase, Uniparc reference UPI0001966B28, Uniprot reference D1PKC7.
[1262] Seq ID No. 1146: Codon optimised DNA encoding 6×His Microbacterium testaceum rhamnosidase, Uniparc reference UPI0001F8A51D, Uniprot reference E8NDD8.
[1263] Seq ID No. 1147: Codon optimised DNA encoding 6×His Solibacter usitatus rhamnosidase, Uniparc reference UPI000053767B, Uniprot reference Q01V09.
[1264] Seq ID No. 1148: Codon optimised DNA encoding 6×His Streptosporangium roseum rhamnosidase, Uniparc reference UPI0001A3EFE6, Uniprot reference D2B240.
[1265] Seq ID No. 1149: Codon optimised DNA encoding 6×His alpha proteobacterium rhamnosidase, Uniparc reference UPI0006CE1E82, Uniprot reference A0A0N1BME3.
[1266] Seq ID No. 1150: Codon optimised DNA encoding 6×His Solitalea canadensis rhamnosidase, Uniparc reference UPI000247229E, Uniprot reference H8KPI7.
[1267] Seq ID No. 1151: Codon optimised DNA encoding 6×His Parabacteroides goldsteinii rhamnosidase, Uniparc reference UPI0002CB9583, Uniprot reference S0GSF0.
[1268] Seq ID No. 1152: Codon optimised DNA encoding 6×His Cyclobacterium marinum rhamnosidase, Uniparc reference UPI00021B9B33, Uniprot reference G0J630.
[1269] Seq ID No. 1153: Codon optimised DNA encoding 6×His Solibacter usitatus rhamnosidase, Uniparc reference UPI0000533669, Uniprot reference Q01TX2.
[1270] Seq ID No. 1154: Codon optimised DNA encoding 6×His Lunatimonas lonarensis rhamnosidase, Uniparc reference UPI00032D8F6D, Uniprot reference R7ZW70.
[1271] Seq ID No. 1155: Codon optimised DNA encoding 6×His Rhizobium leguminosarum rhamnosidase, Uniparc reference UPI0000D713F2, Uniprot reference Q1M7P3.
[1272] Seq ID No. 1156: Codon optimised DNA encoding 6×His Streptosporangium roseum rhamnosidase, Uniparc reference UPI0001A3EBEB, Uniprot reference D2AYU9.
[1273] Seq ID No. 1157: Codon optimised DNA encoding 6×His Parabacteroides distasonis rhamnosidase, Uniparc reference UPI000156F115, Uniprot reference A6LBL4.
[1274] Seq ID No. 1158: Codon optimised DNA encoding 6×His Lachnospiraceae bacterium rhamnosidase, Uniparc reference UPI0003375A10, Uniprot reference R9K6L6.
[1275] Seq ID No. 1159: Codon optimised DNA encoding 6×His Chitinophaga pinensis rhamnosidase, Uniparc reference UPI0001A2F0FA, Uniprot reference C7P9Y8.
[1276] Seq ID No. 1160: Codon optimised DNA encoding 6×His Caulobacter segnis rhamnosidase, Uniparc reference UPI0001BC0C15, Uniprot reference D5VGC3.
[1277] Seq ID No. 1161: Codon optimised DNA encoding 6×His Pedobacter heparinus rhamnosidase, Uniparc reference UPI00019EF6E1, Uniprot reference C6Y145.
[1278] Seq ID No. 1162: Codon optimised DNA encoding 6×His Pedobacter heparinus rhamnosidase, Uniparc reference UPI00019EE1A9, Uniprot reference C6Y2X3.
[1279] Seq ID No. 1163: Codon optimised DNA encoding 6×His Deltaproteobacteria bacterium rhamnosidase, Uniparc reference UPI000C8D4928, Uniprot reference A0A2D5SK32.
[1280] Seq ID No. 1164: Codon optimised DNA encoding 6×His Thermobaculum terrenum rhamnosidase, Uniparc reference UPI00019BFDCE, Uniprot reference D1CHL4.
[1281] Seq ID No. 1165: Codon optimised DNA encoding 6×His Opitutus terrae rhamnosidase, Uniparc reference UPI000172B62A, Uniprot reference B1ZY35.
[1282] Seq ID No. 1166: Codon optimised DNA encoding 6×His Kribbella flavida rhamnosidase, Uniparc reference UPI00019BFABB, Uniprot reference D2PXQ4.
[1283] Seq ID No. 1167: Codon optimised DNA encoding 6×His Streptomyces scabiei rhamnosidase, Uniparc reference UPI0001B80091, Uniprot reference C9Z391.
[1284] Seq ID No. 1168: Codon optimised DNA encoding 6×His Actinoplanes sp. rhamnosidase, Uniparc reference UPI00023EC5D1, Uniprot reference G8S540.
[1285] Seq ID No. 1169: Codon optimised DNA encoding 6×His Asticcacaulis sp. rhamnosidase, Uniparc reference UPI0003C3CD2B, Uniprot reference V4NSJ1.
[1286] Seq ID No. 1170: Codon optimised DNA encoding 6×His Kribbella flavida rhamnosidase, Uniparc reference UPI00019BF65D, Uniprot reference D2PT74.
[1287] Seq ID No. 1171: Codon optimised DNA encoding 6×His Bacillus sp. rhamnosidase, Uniparc reference UPI00000BC760, Uniprot reference Q93RE7.
[1288] Seq ID No. 1172: Codon optimised DNA encoding 6×His Flavobacterium johnsoniae rhamnosidase, Uniparc reference UPI00006E5FAB, Uniprot reference A5FCG3.
[1289] Seq ID No. 1173: Codon optimised DNA encoding 6×His Lunatimonas lonarensis rhamnosidase, Uniparc reference UPI00032EEB9C, Uniprot reference R7ZS84.
[1290] Seq ID No. 1174: Codon optimised DNA encoding 6×His Eisenbergiella massiliensis rhamnosidase, Uniparc reference UPI0004B2D794, Uniprot reference A0A3E3IGR6.
[1291] Seq ID No. 1175: Codon optimised DNA encoding 6×His Catenovulum agarivorans rhamnosidase, Uniparc reference UPI0003ED7515, Uniprot reference W7QF25.
[1292] Seq ID No. 1176: Codon optimised DNA encoding 6×His Streptomyces avermitilis rhamnosidase, Uniparc reference UPI0000184198, Uniprot reference Q82PP4.
[1293] Seq ID No. 1177: N-terminal His-tag/linker
[1294] Seq ID No. 1178: C-terminal linker/His tag
[1295] Seq ID No. 1179: Amino acid sequence for Variant G1.
[1296] Seq ID No. 1180: Amino acid sequence for Variant G2.
[1297] Seq ID No. 1181: Amino acid sequence for Variant G3.
[1298] Seq ID No. 1182: Amino acid sequence for Variant G4.
[1299] Seq ID No. 1183: Amino acid sequence for Variant G5.
[1300] Seq ID No. 1184: Codon optimised DNA encoding N-terminal 6×His Variant G1.
[1301] Seq ID No. 1185: Codon optimised DNA encoding N-terminal 6×His Variant G2.
[1302] Seq ID No. 1186: Codon optimised DNA encoding N-terminal 6×His Variant G3.
[1303] Seq ID No. 1187: Codon optimised DNA encoding N-terminal 6×His Variant G4.
[1304] Seq ID No. 1188: Codon optimised DNA encoding N-terminal 6×His Variant G5.
[1305] Seq ID No. 1189: Amino acid sequence for Variant R1.
[1306] Seq ID No. 1190: Amino acid sequence for Variant R2.
[1307] Seq ID No. 1191: Amino acid sequence for Variant R3.
[1308] Seq ID No. 1192: Amino acid sequence for Variant R4.
[1309] Seq ID No. 1193: Amino acid sequence for Variant R5.
[1310] Seq ID No. 1194: Codon optimised DNA encoding C-terminal 6×His Variant R1.
[1311] Seq ID No. 1195: Codon optimised DNA encoding C-terminal 6×His Variant R2.
[1312] Seq ID No. 1196: Codon optimised DNA encoding C-terminal 6×His Variant R3.
[1313] Seq ID No. 1197: Codon optimised DNA encoding C-terminal 6×His Variant R4.
[1314] Seq ID No. 1198: Codon optimised DNA encoding C-terminal 6×His Variant R5.

### DETAILED DESCRIPTION OF THE INVENTION

[1315] As mentioned previously, saponins are steroid or terpenoid glycosides which have a broad range of uses. Current approaches to obtaining certain saponins in suitable quantities and of suitable purities are limiting. The present inventors have surprisingly found that enzymatic modification of saponins can facilitate improved availability of saponins of interest and/or facilitate removal of undesired saponin components. The present invention therefore provides methods for the enzymatic modification of saponins, products made by such methods, uses of said products and associated aspects. In methods of the invention a starting saponin (i.e. a saponin to be modified by an enzyme) is converted into a product saponin (i.e. the saponin resulting from enzymatic modification of the starting saponin).

[1316] Engineered glucosidase polypeptides of the present invention may be used in methods for the enzymatic modification of saponins.

[1317] Engineered rhamnosidase polypeptides of the present invention may be used in methods for the enzymatic modification of saponins.

### Objectives

[1318] The present invention can be applied to achieve a plurality of objectives, such as: (i) improving the yield of saponins of interest obtainable from a given starting material; (ii) broadening the range of starting materials suitable for obtaining saponins of interest; and/or (iii) convenient removal of undesired saponins from saponins of interest.

[1319] Where supply is constrained for a starting material from which a saponin of interest is isolated, achieving the maximum yield of the saponin of interest is clearly important. Independent of the efficiency of extraction and separation processes which would generally be adapted for optimal isolation of existing saponin of interest, the present invention may be applied to increase the amount of a saponin of interest which may be obtained from a given starting material. Enzymatic modification of other saponins present in the starting material to form a saponin of interest can increase the amount of the saponin of interest which may be obtained.

[1320] Saponins may be obtained from a broad range of starting materials. The presence of specific saponins and their levels in plant material may depend on a range of factors such as a plant species, tissue, age, season, environmental conditions and the like. Variation may be observed between plants (such as trees) of the same species (see, for example, WO2018057031). The burden associated with extraction and/or isolation of a saponin of interest may mean that certain potential sources of the saponin of interest are not commercially viable, due to the saponin of interest being present at relatively low levels. Enzymatic modification of other saponins present in the starting material to form a saponin of interest can expand the range of viable starting materials for obtaining the saponin of interest.

[1321] It is well understood that different saponins may have different activity profiles—both positive/desired activities and negative/undesired activities. Some uses of saponins require a high degree of purification and separating a saponin of interest from other saponins, particularly those of similar structure or physical properties, can be burdensome. Enzymatic modification of such other saponins may alter their physical properties and may thereby facilitate separation from a saponin of interest. Other uses of saponins may not require a high degree of purity per se, nevertheless it may still be desirable to remove or reduce the amount of a particular saponin component (or components) within a saponin mixture without burdensome chromatographic methods. Enzymatic modification can facilitate removal or reduction in the level of a particular saponin component within a saponin mixture without the need for chromatographic means.

### Saponins

[1322] The methods of the present invention require a starting saponin (i.e. a saponin which is intended to be enzymatically modified). The starting saponin may be a naturally occurring saponin (i.e. a steroid or terpenoid glycoside found in nature) or an artificially created saponin (i.e. a steroid or terpenoid glycoside not found in nature).

[1323] In some embodiments the starting saponin is a steroid glycoside, in other embodiments the starting saponin is a terpenoid glycoside, especially a triterpenoid glycoside.

[1324] Naturally occurring starting saponins may be obtained by extraction or may be prepared synthetically (fully or semi-synthetically).

[1325] Naturally occurring starting saponins include those obtainable from, such as obtained from, plants of the genera Gypsophilia, Saponaria or Quillaja (Bomford, 1992). Especially of interest are starting saponins obtainable from plants of Quillaja species. Particular starting saponins of interest include those obtainable from Quillaja brasiliensis or Quillaja saponaria. In one embodiment the starting saponin is obtainable from Quillaja saponaria, such as obtained from Quillaja saponaria. In one embodiment the starting saponin is obtainable from Quillaja brasiliensis, such as obtained from Quillaja brasiliensis.

[1326] In certain embodiments the starting saponin is a quillaic acid glycoside. In certain embodiments the starting saponin is a phytolaccinic acid glycoside. In certain embodiments the starting saponin is an echinocystic acid glycoside. In certain embodiments the starting saponin is a 22-beta-hydroxylated quillaic acid glycoside. In certain embodiments the starting saponin is an gypsogenin glycoside.

[1327] Analysis of water/methanol extracts of Quillaja saponaria bark by liquid chromatography/mass spectrometry has revealed over 100 saponins (Nyberg, 2000; Nyberg, 2003; Kite, 2004). Quillaja brasiliensis extracts have also been described, with many saponin components in Quillaja brasiliensis extracts corresponding to saponins found in Quillaja saponaria extracts. (Wallace, 2017; Wallace, 2019).

[1328] The following text describes particular quillaic acid derived starting and product saponins which are grouped by ‘family’. Each family has one or more common structural features which characterise the family relative to other families. Individual components within each family also display certain structural features which characterise the component relative to other components of the family, including: xylose or rhamnose chemotype—the presence of a xylose or rhamnose residue in the C3 saccharide; A or B isomers—A having the acyl chain linked through the 4-position of the D-fucose, B at having the acyl chain linked through the 3-position of the D-fucose; V1 and V2—the presence of a terminal apiose or xylose residue in the C28 saccharide (in other components of a family this terminal residue may also be absent). The text focuses on components which typically have a significant presence in Quillaja saponaria aqueous extracts, but it will be appreciated that (i) other components of a family also exist and (ii) the proportions of different components of a family may vary both between families and between different saponin sources (Kite, 2004). The specific extraction method used may also influence the proportions of different components obtained.

[1329] A and B isomers may be separable using chromatographic techniques. However, under suitable solvent conditions these isomers will revert to equilibrium proportions (see e.g. Cleland, 1996). Xylose and rhamnose chemotypes typically elute closely, depending on chromatographic technique the rhamnose chemotype may form a minor peak closely preceding or overlapping with the main peak for the family.

[1330] Those skilled in the art will also recognise that the structures described contain ionisable groups and under appropriate circumstances may exist in dissociated forms or as salts. Structures are generally shown with the glucuronate moiety in ionised form and the indicated molecular weight is calculated directly from the ion shown (corresponding to the monoisotopic m/z observed with negative mode electrospray mass spectrometry), however, all non-dissociated, dissociated and salt forms are intended to be encompassed by the recited definitions. Salts are desirably pharmaceutically acceptable, although non-pharmaceutically acceptable salts can nevertheless be useful during manufacture of pharmaceuticals or for non-pharmaceutical uses.

[1331] Starting saponins obtainable from Quillaja saponaria include:
[1332] QS-18 family components (i.e. triterpenoid glycosides having beta-O-glucopyranosylation at the C3 position of the L-rhamnose moiety of QS-21 family components), such as:
   [1333] ‘QS-18 2150 A component’, being the triterpenoid glycosides identified as part of the QS-18 main peak in FIG. 2 and having a m/z of 2150 with negative mode electrospray mass spectrometry. The QS-18 2150 A component is believed to be identified in Kite 2004 as Peak 76 and corresponds to the A-isomer xylose chemotype structures B4 (apiose isomer) and B6 (xylose isomer) characterised in Nyberg 2000 and Nyberg 2003. The QS-18 2150 A component may consist of QS-18 2150 A V1 (i.e. apiose isomer):

[chemical structure]

[1334] and/or QS-18 2150 A V2 (i.e. xylose isomer):

[chemical structure]

[1335] ‘QS-18 2018 A component’, being the triterpenoid glycosides identified as part of the QS-18 main peak in FIG. 2 and having m/z of 2018 with negative mode electrospray mass spectrometry. The QS-18 A 2018 component is believed to be identified in Kite 2004 as Peak 73 and corresponds to the A-isomer xylose chemotype structure B2 characterised in Nyberg 2000 and Nyberg 2003. The QS-18 2018 A component may consist of QS-18 2018 A:

[chemical structure]

[1336] ‘QS-18 2164 A component’, being the triterpenoid glycosides identified as part of the QS-18 main peak in FIG. 2 and having a m/z of 2164 with negative mode electrospray mass spectrometry. The QS-18 2164 A component is believed to be identified in Kite 2004 as Peak 74 and corresponds to the A-isomer rhamnose chemotype structures B3 (apiose isomer) and B5 (xylose isomer) characterised in Nyberg 2000 and Nyberg 2003. The QS-18 2164 A component may consist of QS-18 2164 A V1 (i.e. apiose isomer):

[chemical structure]

[1337] and/or QS-18 2164 A V2 (i.e. xylose isomer):

[chemical structure]

[1338] ‘QS-18 2150 B component’, being triterpenoid glycosides having a m/z of 2150 with negative mode electrospray mass spectrometry. The QS-18 2150 B component corresponds to the B-isomer xylose chemotype structures B4a (apiose isomer) and B6a (xylose isomer) characterised in Nyberg 2000 and Nyberg 2003. The QS-18 2150 B component may consist of QS-18 2150 B V1 (i.e. apiose isomer):

[chemical structure]

[1339] and/or QS-18 2150 B V2 (i.e. xylose isomer):

[chemical structure]

[1340] ‘QS-18 2018 B component’, being triterpenoid glycosides having a m/z of 2018 with negative mode electrospray mass spectrometry. The QS-18 2018 B component corresponds to the B-isomer xylose chemotype structure B2a characterised in Nyberg 2000 and Nyberg 2003. The QS-18 2018 B component may consist of QS-18 2018 B:

[chemical structure]

[1341] ‘QS-18 2164 B component’, being triterpenoid glycosides having a m/z of 2164 with negative mode electrospray mass spectrometry. The QS-18 2164 B corresponds to the B-isomer rhamnose chemotype structures B3a (apiose isomer) and B5a (xylose isomer). The QS-18 2164 B component may consist of QS-18 2164 B V1 (i.e. apiose isomer):

[chemical structure]

[1342] and/or QS-18 2164 B V2 (i.e. xylose isomer):

[chemical structure]

[1343] desglucosyl-QS-17 family components (i.e. triterpenoid glycosides having alpha-O-rhamnosylation at the C2 position of the arabinofuranose moiety of QS-21 family components but lacking the glycosylation of QS-17 family components), such as:
   [1344] ‘desglucosyl-QS-17 2134 A component’, being triterpenoid glycosides having a m/z of 2134 with negative mode electrospray mass spectrometry. The desglucosyl-QS-17 2134 A component is believed to be identified in Kite 2004 as Peak 75 and corresponds to A-isomers of the xylose chemotype. The desglucosyl-QS-17 2134 A component may consist of desglucosyl-QS-17 2134 A V1 (i.e. apiose isomer):

[chemical structure]

[1345] and/or desglucosyl-QS-17 2134 A V2 (i.e. xylose isomer):

[chemical structure]

[1346] ‘desglucosyl-QS-17 2002 A component’, being triterpenoid glycosides having a m/z of 2002 with negative mode electrospray mass spectrometry. The desglucosyl-QS-17 2002 A component corresponds to the A-isomer xylose chemotype and may consist of desglucosyl-QS-17 2002 A:

[chemical structure]

[1347] ‘desglucosyl-QS-17 2148 A component’, being triterpenoid glycosides having a m/z of 2148 with negative mode electrospray mass spectrometry. The desglucosyl-QS-17 2148 A component is believed to be identified in Kite 2004 as Peaks 70 and 72 and corresponds to the A-isomer rhamnose chemotype. The desglucosyl-QS-17 2148 A component may consist of desglucosyl-QS-17 2148 A V1 (i.e. apiose isomer):

[chemical structure]

[1348] and/or desglucosyl-QS-17 2148 A V2 (i.e. xylose isomer):

[chemical structure]

[1349] ‘desglucosyl-QS-17 2134 B component’, being triterpenoid glycosides having a m/z of 2134 with negative mode electrospray mass spectrometry. The desglucosyl-QS-17 2134 B component is believed to be identified in Kite 2004 as Peak 67 and corresponds to B-isomers of the xylose chemotype. The desglucosyl-QS-17 2134 B component may consist of desglucosyl-QS-17 2134 B V1 (i.e. apiose isomer):

[chemical structure]

[1350] and/or desglucosyl-QS-17 2134 B V2 (i.e. xylose isomer):

[chemical structure]

[1351] ‘desglucosyl-QS-17 2002 B component’, being triterpenoid glycosides having a m/z of 2002 with negative mode electrospray mass spectrometry. The desglucosyl-QS-17 2002 B component corresponds to the B-isomer of the xylose chemotype and may consist of desglucosyl-QS-17 2002 B:

[chemical structure]

[1352] ‘desglucosyl-QS-17 2148 B component’, being triterpenoid glycosides having a m/z of 2148 with negative mode electrospray mass spectrometry. The desglucosyl-QS-17 2148 B component is believed to be identified in Kite 2004 as Peak 65 and corresponds to B-isomers of the rhamnose chemotype. The desglucosyl-QS-17 2148 B component may consist of desglucosyl-QS-17 2148 B V1 (i.e. apiose isomer):

[chemical structure]

[1353] and/or desglucosyl-QS-17 2148 B V2 (i.e. xylose isomer):

[chemical structure]

[1354] QS-17 family components (i.e. triterpenoid glycosides having beta-O-glucopyranosylation at the C3 position of the L-rhamnose moiety and alpha-O-rhamnosylation at the C2 position of the arabinofuranose moiety of QS-21 family components), such as:
   [1355] ‘QS-17 2296 A component’, being the triterpenoid glycosides identified as part of the QS-17 main peak in FIG. 2 and having a m/z of 2296 with negative mode electrospray mass spectrometry. The QS-17 2296 A component is believed to be identified in Kite 2004 as Peak 59 and corresponds to the A-isomers of xylose chemotype structure QS-Ill. The QS-17 2296 A component may consist of QS-17 2296 A V1 (i.e. apiose isomer):

[chemical structure]

[1356] and/or QS-17 2296 A V2 (i.e. xylose isomer):

[chemical structure]

[1357] ‘QS-17 2164 A component’, being the triterpenoid glycosides identified as part of the QS-17 main peak in FIG. 2 and having a m/z of 2164 with negative mode electrospray mass spectrometry. The QS-17 2164 A component is believed to be identified in Kite 2004 as Peak 58 and corresponds to the A-isomer xylose chemotype. The QS-17 2164 A component may consist of QS-17 2164 A:

[chemical structure]

[1358] ‘QS-17 2310 A component’, being the triterpenoid glycosides identified as part of the QS-17 main peak in FIG. 2 and having a m/z of 2310 with negative mode electrospray mass spectrometry. The QS-17 2310 A component is believed to be identified in Kite 2004 as Peak 57 and corresponds to A-isomers of the rhamnose chemotype. The QS-17 2310 A component may consist of QS-17 2310 A V1 (i.e. apiose isomer):

[chemical structure]

[1359] and/or QS-17 2310 A V2 (i.e. xylose isomer):

[chemical structure]

[1360] ‘QS-17 2296 B component’, being triterpenoid glycosides having a m/z of 2296 with negative mode electrospray mass spectrometry. The QS-17 2296 B component corresponds to the B-isomers of xylose chemotype structure QS-III in Kite 2004. The QS-17 2296 B component may consist of QS-17 2296 B V1 (i.e. apiose isomer):

[chemical structure]

[1361] and/or QS-17 2296 B V2 (i.e. xylose isomer):

[chemical structure]

[1362] ‘QS-17 2164 B component’, being triterpenoid glycosides having a m/z of 2164 with negative mode electrospray mass spectrometry. The QS-17 2164 B component corresponds to the B-isomer xylose chemotype. The QS-17 2164 B component and may consist of QS-17 2164 B:

[chemical structure]

[1363] ‘QS-17 2310 B component’, being triterpenoid having a m/z of 2310 with negative mode electrospray mass spectrometry. The QS-17 2310 B component corresponds to B-isomers of the rhamnose chemotype. The QS-17 2310 B component may consist of QS-17 2310 B V1 (i.e. apiose isomer):

[chemical structure]

[1364] and/or QS-17 2310 B V2 (i.e. xylose isomer);

[chemical structure]

[1365] desarabinofuranosyl-QS-18 family components (i.e. triterpenoid glycosides having beta-O-glucopyranosylation at the C3 position of the L-rhamnose moiety and but lacking the arabinofuranose moiety of QS-21 family components). The desarabinofuranosyl-QS-18 family components are present in relatively low amounts in extracts, meaning that they have not been subjected to detailed characterisation. Desarabinofuranosyl-QS-18 family components can be challenging to isolate from QS-21 family components. Desarabinofuranosyl-QS-18 family components include:
   [1366] desarabinofuranosyl-QS-18 2018 A component (i.e. triterpenoid glycosides identified as part of the ‘2018 Peak’ in FIG. 6. Suitably the desarabinofuranosyl-QS-18 2018 A component in the UPLC-UV/MS methods described herein has a retention time of approximately 4.5 min, the primary component of the peak having a m/z of 2018 with negative mode electrospray mass spectrometry. The desarabinofuranosyl-QS-18 2018 A component may also be identified in the UPLC-UV methods described herein with a retention time of approximately 5.8 min. The desarabinofuranosyl-QS-18 2018 A component is believed to be identified in Kite 2004 as Peak 90 and corresponds to A-isomers of the xylose chemotype. Putative structures have been identified for the primary desarabinofuranosyl-QS-18 2018 A components using MS/MS. The desarabinofuranosyl-QS-18 2018 A component may consist of desarabinofuranosyl-QS-18 2018 A V1 (i.e. apiose isomer):

[chemical structure]

[1367] and/or desarabinofuranosyl-QS-18 2018 A V2 (i.e. xylose isomer):

[chemical structure]

[1368] desarabinofuranosyl-QS-18 1886 A component (i.e. triterpenoid glycosides identified as part of the ‘2018 Peak’ in FIG. 6. Suitably the desarabinofuranosyl-QS-18 1886 A component in the UPLC-UV/MS methods described herein has a retention time of approximately 4.5 min and a m/z of 1886 with negative mode electrospray mass spectrometry. The desarabinofuranosyl-QS-18 1886 A component and corresponds to the A-isomer xylose chemotype may also be identified in the UPLC-UV methods described herein with a retention time of approximately 5.8 min. The desarabinofuranosyl-QS-18 1886 A component may consist of:

[chemical structure]

[1369] desarabinofuranosyl-QS-18 2032 A component (i.e. triterpenoid glycosides identified as part of the ‘2018 Peak’ in FIG. 6. Suitably the desarabinofuranosyl-QS-18 2032 A component in the UPLC-UV/MS methods described herein has a retention time of approximately 4.5 min and a m/z of 2032 with negative mode electrospray mass spectrometry. The desarabinofuranosyl-QS-18 2032 A component corresponds to A-isomers of the rhamnose chemotype and may also be identified in the UPLC-UV methods described herein with a retention time of approximately 5.8 min. The desarabinofuranosyl-QS-18 2032 A component may consist of desarabinofuranosyl-QS-18 2032 A V1 (i.e. apiose isomer):

[chemical structure]

[1370] and/or desarabinofuranosyl-QS-18 2032 A V2 (i.e. xylose isomer):

[chemical structure]

[1371] desarabinofuranosyl-QS-18 2018 B component, i.e. triterpenoid glycosides having a m/z of 2018 with negative mode electrospray mass spectrometry. The desarabinofuranosyl-QS-18 2018 B component corresponds to B-isomers of the xylose chemotype. Desarabinofuranosyl-QS-18 2018 B component may consist of desarabinofuranosyl-QS-18 2018 B V1 (i.e. apiose isomer):

[chemical structure]

[1372] and/or desarabinofuranosyl-QS-18 2018 B V2 (i.e. xylose isomer):

[chemical structure]

[1373] desarabinofuranosyl-QS-18 1886 B component, i.e. triterpenoid glycosides identified having a m/z of 1886 with negative mode electrospray mass spectrometry. The desarabinofuranosyl-QS-18 1886 B component corresponds to the B-isomer xylose chemotype. The desarabinofuranosyl-QS-18 1886 B component may consist of:

[chemical structure]

[1374] desarabinofuranosyl-QS-18 2032 B component, i.e. triterpenoid glycosides having a m/z of 2032 with negative mode electrospray mass spectrometry. The desarabinofuranosyl-QS-18 2032 B component corresponds to B-isomers of the rhamnose chemotype. The desarabinofuranosyl-QS-18 2032 B component may consist of desarabinofuranosyl-QS-18 2032 B V1 (i.e. apiose isomer):

[chemical structure]

[1375] and/or desarabinofuranosyl-QS-18 2032 B V2 (i.e. xylose isomer):

[chemical structure]

[1376] acetylated desglucosyl-QS-17 family components (i.e. triterpenoid glycosides having alpha-O-rhamnosylation at the C2 position of the arabinofuranose moiety and acetylation of the C3 position of the fucose of QS-21 family components), such as:
   [1377] ‘acetylated desglucosyl-QS-17 2176 A component’, being triterpenoid glycosides having a m/z of 2176 with negative mode electrospray mass spectrometry. The acetylated desglucosyl-QS-17 2176 A component corresponds to A-isomers of the xylose chemotype. The acetylated desglucosyl-QS-17 2176 A component may consist of acetylated desglucosyl-QS-17 2176 A V1 (i.e. apiose isomer):

[chemical structure]

[1378] and/or acetylated desglucosyl-QS-17 2176 A V2 (i.e. xylose isomer):

[chemical structure]

[1379] ‘acetylated desglucosyl-QS-17 2044 A component’, being triterpenoid glycosides having m/z of 2044 with negative mode electrospray mass spectrometry. The acetylated desglucosyl-QS-17 2044 A component corresponds to the A-isomer xylose chemotype. The acetylated desglucosyl-QS-17 2044 A component may consist of acetylated desglucosyl-QS-17 2044 A:

[chemical structure]

[1380] ‘acetylated desglucosyl-QS-17 2190 A component’, being triterpenoid glycosides having a m/z of 2190 with negative mode electrospray mass spectrometry. The acetylated desglucosyl-QS-17 2190 A corresponds to the A-isomer rhamnose chemotype. The acetylated desglucosyl-QS-17 2190 A component may consist of acetylated desglucosyl-QS-17 2190 A V1 (i.e. apiose isomer):

[chemical structure]

[1381] and/or acetylated desglucosyl-QS-17 2190 A V2 (i.e. xylose isomer):

[chemical structure]

[1382] Starting saponins of direct relevance to the engineered glucosidase polypeptides are those having cleavable glucose residues, nevertheless, the engineered glucosidase polypeptides may be utilised in conjunction with additional enzymes capable of cleaving other sugar residues. Particular starting saponins of relevance to the engineered glucosidase polypeptides include:
[1383] QS-18 family components;
[1384] QS-17 family components; and
[1385] desarabinofuranosyl-QS-18 family components.

[1386] Starting saponins of direct relevance to the engineered rhamnosidase polypeptides are those having cleavable rhamnose residues, nevertheless, the engineered rhamnosidase polypeptides may be utilised in conjunction with additional enzymes capable to cleaving other sugar residues. Particular starting saponins of relevance to the engineered rhamnosidase polypeptides include:
[1387] desglucosyl-QS-17 family components;
[1388] QS-17 family components; and
[1389] acetylated desglucosyl-QS-17 family components.

[1390] The methods of the present invention enzymatically modify a starting saponin to provide a product saponin. The product saponin may be a naturally occurring saponin (i.e. a steroid or terpenoid glycoside found in nature, though the product saponin is itself obtained by the methods of the invention) or an artificially created saponin (i.e. a steroid or terpenoid glycoside not found in nature).

[1391] In some embodiments the product saponin is a steroid glycoside, in other embodiments the product saponin is a terpenoid glycoside, especially a triterpenoid glycoside.

[1392] Naturally occurring product saponins include those obtainable from plants of the genera Gypsophilia, Saponaria or Quillaja (Bomford, 1992). Especially of interest are product saponins obtainable from plants of Quillaja species. Particular product saponins of interest include those obtainable from Quillaja brasiliensis or Quillaja saponaria. In one embodiment the product saponin is obtainable from Quillaja saponaria. In one embodiment the product saponin is obtainable from Quillaja brasiliensis.

[1393] In certain embodiments the product saponin is a quillaic acid glycoside.

[1394] Product saponins obtainable from Quillaja saponaria include:
[1395] QS-18 family components (i.e. triterpenoid glycosides having beta-O-glucopyranosylation at the C3 position of the L-rhamnose moiety of QS-21 family components), such as:
   [1396] ‘QS-18 2150 A component’. The QS-18 2150 A component may consist of QS-18 2150 A V1 (i.e. apiose isomer):

[chemical structure]

[1397] and/or QS-18 2150 A V2 (i.e. xylose isomer):

[chemical structure]

[1398] ‘QS-18 2018 A component’. The QS-18 2018 A component may consist of QS-18 2018 A:

[chemical structure]

[1399] ‘QS-18 2164 A component’. The QS-18 2164 A component may consist of QS-18 2164 A V1 (i.e. apiose isomer):

[chemical structure]

[1400] and/or QS-18 2164 A V2 (i.e. xylose isomer):

[chemical structure]

[1401] ‘QS-18 2150 B component’. The QS-18 2150 B component may consist of QS-18 2150 B V1 (i.e. apiose isomer):

[chemical structure]

[1402] and/or QS-18 2150 B V2 (i.e. xylose isomer):

[chemical structure]

[1403] ‘QS-18 2018 B component’. The QS-18 2018 B component may consist of QS-18 2018 B:

[chemical structure]

[1404] ‘QS-18 2164 B component’. The QS-18 2164 B component may consist of QS-18 2164 B V1 (i.e. apiose isomer):

[chemical structure]

[1405] and/or QS-18 2164 B V2 (i.e. xylose isomer):

[chemical structure]

[1406] desglucosyl-QS-17 family components (i.e. triterpenoid glycosides having alpha-O-rhamnosylation at the C2 position of the arabinofuranose moiety of QS-21 family components), such as:
   [1407] ‘desglucosyl-QS-17 2134 A component’. The desglucosyl-QS-17 2134 A component may consist of desglucosyl-QS-17 2134 A V1 (i.e. apiose isomer):

[chemical structure]

[1408] and/or desglucosyl-QS-17 2134 A V2 (i.e. xylose isomer):

[chemical structure]

[1409] ‘desglucosyl-QS-17 2002 A component’. The desglucosyl-QS-17 2002 A component may consist of desglucosyl-QS-17 2002 A:

[chemical structure]

[1410] ‘desglucosyl-QS-17 2148 A component’. The desglucosyl-QS-17 2148 A component may consist of desglucosyl-QS-17 2148 A V1 (i.e. apiose isomer):

[chemical structure]

[1411] and/or desglucosyl-QS-17 2148 A V2 (i.e. xylose isomer):

[chemical structure]

[1412] ‘desglucosyl-QS-17 2134 B component’. The desglucosyl-QS-17 2134 B component may consist of desglucosyl-QS-17 2134 B V1 (i.e. apiose isomer):

[chemical structure]

[1413] and/or desglucosyl-QS-17 2134 B V2 (i.e. xylose isomer):

[chemical structure]

[1414] ‘desglucosyl-QS-17 2002 B component’. The desglucosyl-QS-17 2002 B component may consist of desglucosyl-QS-17 2002 B:

[chemical structure]

[1415] ‘desglucosyl-QS-17 2148 B component’. The desglucosyl-QS-17 2148 B component may consist of desglucosyl-QS-17 2148 B V1 (i.e. apiose isomer):

[chemical structure]

[1416] and/or desglucosyl-QS-17 2148 B V2 (i.e. xylose isomer):

[chemical structure]

[1417] QS-21 family components, such as:
   [1418] ‘QS-21 1988 A component’, being the triterpenoid glycosides identified as part of the QS-21 main peak in FIG. 6 and having a m/z of 1988 with negative mode electrospray mass spectrometry. Suitably the QS-21 1988 A component in the UPLC-UV/MS methods described herein has a retention time of approximately 4.4 min and a m/z of 1988 with negative mode electrospray mass spectrometry. The QS-21 1988 A component is believed to be identified in Kite 2004 as Peak 88 and corresponds to the A-isomer xylose chemotype structures S6 (apiose isomer) and S4 (xylose isomer) characterised in Nyberg 2000 and Nyberg 2003. The QS-21 1988 A component may consist of QS-21 1988 A V1 (i.e. apiose isomer):

[chemical structure]

[1419] and QS-21 1988 A V2 (i.e. xylose isomer):

[chemical structure]

[1420] ‘QS-21 1856 A component’, being the triterpenoid glycosides identified as part of the QS-21 main peak in FIG. 6 and having a m/z of 1856 with negative mode electrospray mass spectrometry. Suitably the QS-21 1856 A component in the UPLC-UV/MS methods described herein has a retention time of approximately 4.4 min and a m/z of 1856 with negative mode electrospray mass spectrometry. The QS-21 1856 A component is believed to be identified in Kite 2004 as Peak 86 and corresponds to the A-isomer xylose chemotype structure S2 characterised in Nyberg 2000 and Nyberg 2003. The QS-21 1856 A component may consist of:

[chemical structure]

[1421] ‘QS-21 2002 A component’, being the triterpenoid glycosides identified as part of the QS-21 main peak in FIG. 6 and having a m/z of 2002 with negative mode electrospray mass spectrometry. Suitably the QS-21 2002 A component in the UPLC-UV/MS methods described herein has a retention time of approximately 4.4 min and a m/z of 2002 with negative mode electrospray mass spectrometry. The QS-21 2002 A component is believed to be identified in Kite 2004 as Peak 85 and corresponds to the A-isomer rhamnose chemotype of structures S3 and S5 characterised in Nyberg 2000 and Nyberg 2003. The QS-21 2002 A component may consist of QS-21 2002 A V1 (i.e. apiose isomer):

[chemical structure]

[1422] and QS-21 2002 A V2 (i.e. xylose isomer):

[chemical structure]

[1423] ‘QS-21 1988 B component’, being the triterpenoid glycosides identified as part of the B-isomer peak in FIG. 6 and having a m/z of 1988 with negative mode electrospray mass spectrometry. Suitably the QS-21 1988 B component in the UPLC-UV/MS methods described herein has a retention time of approximately 4.0 min and a m/z of 1988 with negative mode electrospray mass spectrometry. The QS-21 1988 B component corresponds to the B-isomer xylose chemotype structures S6a (apiose isomer) and S4a (xylose isomer) characterised in Nyberg 2000 and Nyberg 2003. The QS-21 1988 B component may consist of QS-21 1988 B V1 (i.e. apiose isomer):

[chemical structure]

[1424] and QS-21 1988 B V2 (i.e. xylose isomer):

[chemical structure]

[1425] ‘QS-21 1856 B component’, being the triterpenoid glycosides identified as part of the B-isomer peak in FIG. 6 and having a m/z of 1856 with negative mode electrospray mass spectrometry. The QS-21 1856 B component corresponds to the B-isomer xylose chemotype structure S2a characterised in Nyberg 2000 and Nyberg 2003. The QS-21 1856 B component may consist of:

[chemical structure]

[1426] ‘QS-21 2002 B component’, being the triterpenoid glycosides having a m/z of 2002 with negative mode electrospray mass spectrometry. The QS-21 2002 B component corresponds to the B-isomer rhamnose chemotype of structures S3a and S5a characterised in Nyberg 2000 and Nyberg 2003. The QS-21 2002 B component may consist of QS-21 2002 B component V1 (i.e. apiose isomer):

[chemical structure]

[1427] and QS-21 2002 B V2 (i.e. xylose isomer):

[chemical structure]

[1428] desarabinofuranosyl-QS-21 family components (i.e. triterpenoid glycosides lacking the arabinofuranose moiety of QS-21 family components). The desarabinofuranosyl-QS-21 family components are present in relatively low amounts in extracts, meaning that they have not been subjected to detailed characterisation. Desarabinofuranosyl-QS-21 family components include:
   [1429] desarabinofuranosyl-QS-21 1856 A component (i.e. triterpenoid glycosides identified as part of the ‘Lyophilization Peak’ in FIG. 6. Suitably the desarabinofuranosyl-QS-21 1856 A component in the UPLC-UV/MS methods described herein has a retention time of approximately 4.7 min, the primary component of the peak having a m/z of 1856 with negative mode electrospray mass spectrometry. The desarabinofuranosyl-QS-21 1856 A component is believed to be identified in Kite 2004 as Peak 96. Putative structures have been identified for the primary desarabinofuranosyl-QS-21 1856 A components using MS/MS. The desarabinofuranosyl-QS-21 1856 A component may consist of desarabinofuranosyl-QS-21 1856 A V1 (i.e. apiose isomer):

[chemical structure]

[1430] and/or desarabinofuranosyl-QS-21 1856 A V2 (i.e. xylose isomer):

[chemical structure]

[1431] desarabinofuranosyl-QS-21 1712 A component (i.e. triterpenoid glycosides identified as part of the ‘Lyophilization Peak’ in FIG. 6. Suitably the desarabinofuranosyl-QS-21 1712 A component in the UPLC-UV/MS methods described herein has a retention time of approximately 4.7 min and a m/z of 1712 with negative mode electrospray mass spectrometry. The desarabinofuranosyl-QS-21 1712 A component may consist of desarabinofuranosyl-QS-21 1712 A:

[chemical structure]

[1432] desarabinofuranosyl-QS-21 1870 A component, i.e. triterpenoid glycosides having a m/z of 1870 with negative mode electrospray mass spectrometry. The desarabinofuranosyl-QS-21 1870 A component may consist of desarabinofuranosyl-QS-21 1870 A V1 (i.e. apiose isomer):

[chemical structure]

[1433] and/or desarabinofuranosyl-QS-21 1870 A V2 (i.e. xylose isomer):

[chemical structure]

[1434] desarabinofuranosyl-QS-21 1856 B component, i.e. triterpenoid glycosides having a m/z of 1856 with negative mode electrospray mass spectrometry. The desarabinofuranosyl-QS-21 1856 B component may consist of desarabinofuranosyl-QS-21 1856 B V1 (i.e. apiose isomer):

[chemical structure]

[1435] and/or desarabinofuranosyl-QS-21 1856 B V2 (i.e. xylose isomer):

[chemical structure]

[1436] desarabinofuranosyl-QS-21 1712 B component, i.e. triterpenoid glycosides having a m/z of 1712 with negative mode electrospray mass spectrometry. The desarabinofuranosyl-QS-21 1712 B component may consist of desarabinofuranosyl-QS-21 1712 B:

[chemical structure]

[1437] desarabinofuranosyl-QS-21 1870 B component, i.e. triterpenoid glycosides having a m/z of 1870 with negative mode electrospray mass spectrometry. The desarabinofuranosyl-QS-21 1870 B component may consist of desarabinofuranosyl-QS-21 1870 B V1 (i.e. apiose isomer):

[chemical structure]

[1438] and/or desarabinofuranosyl-QS-21 1870 B V2 (i.e. xylose isomer):

[chemical structure]

[1439] acetylated QS-21 family components (i.e. triterpenoid glycosides having acetylation of the C3 position of the fucose of QS-21 family components), such as:
   [1440] ‘acetylated QS-21 2030 A component’, being triterpenoid glycosides having a m/z of 2030 with negative mode electrospray mass spectrometry. The acetylated QS-21 2030 A corresponds to the A-isomer xylose chemotype. The acetylated QS-21 2030 A component may consist of acetylated QS-21 2030 A V1 (i.e. apiose isomer):

[chemical structure]

[1441] and/or acetylated QS-21 2030 A V2 (i.e. xylose isomer):

[chemical structure]

[1442] ‘acetylated QS-21 1898 A component’, being triterpenoid glycosides having a m/z of 1898 with negative mode electrospray mass spectrometry. The acetylated QS-21 1898 A corresponds to the A-isomer xylose chemotype. The acetylated QS-21 1898 A component may consist of acetylated QS-21 1898 A:

[chemical structure]

[1443] ‘acetylated QS-21 2044 A component’, being triterpenoid glycosides having a m/z of 2044 with negative mode electrospray mass spectrometry. The acetylated QS-21 2044 A corresponds to A-isomers of the rhamnose chemotype. The acetylated QS-21 2044 A component may consist of acetylated QS-21 2044 A V1 (i.e. apiose isomer):

[chemical structure]

[1444] and/or acetylated QS-21 2044 A V2 (i.e. xylose isomer):

[chemical structure]

[1445] Product saponins of direct relevance to the engineered glucosidase polypeptides are those where a glucose residue has been cleaved relative to a starting saponin. Nevertheless, the engineered glucosidase polypeptides may be utilised in conjunction with additional enzymes capable to cleaving other sugar residues. Particular product saponins of relevance to the engineered glucosidase polypeptides include:
[1446] desglucosyl-QS-17 family components;
[1447] QS-21 family components; and
[1448] desarabinofuranosyl-QS-21 family components.

[1449] Product saponins of direct relevance to the engineered rhamnosidase polypeptides are those where a rhamnose residue has been cleaved relative to a starting saponin. Nevertheless, the engineered rhamnosidase polypeptides may be utilised in conjunction with additional enzymes capable to cleaving other sugar residues. Particular product saponins of relevance to the engineered rhamnosidase polypeptides include:
[1450] QS-18 family components;
[1451] QS-21 family components; and
[1452] acetylated QS-21 family components.

[1453] The term QS-18 family components as used herein means the xylose chemotype QS-18 2150 component (A and B isomers, and apiose and xylose isomers: QS-18 2150 A V1, QS-18 2150 A V2, QS-18 2150 B V1 and QS-18 2150 B V2), the xylose chemotype QS-18 2018 component (A and B isomers: QS-18 2018 A and QS-18 2018 B), the rhamnose chemotype QS-18 2164 component (A and B isomers, and apiose and xylose isomers: QS-18 2164 A V1, QS-18 2164 A V2, QS-18 2164 B V1 and QS-18 2164 B V2).

[1454] The term desglucosyl-QS-17 family components as used herein means the xylose chemotype desglucosyl-QS-17 2134 component (A and B isomers, and apiose and xylose isomers: desglucosyl-QS-17 2134 A V1, desglucosyl-QS-17 2134 A V2, desglucosyl-QS-17 2134 B V1 and desglucosyl-QS-17 2134 B V2), the xylose chemotype desglucosyl-QS-17 2002 component (A and B isomers: desglucosyl-QS-17 2002 A and desglucosyl-QS-17 2002 B), the rhamnose chemotype desglucosyl-QS-17 2148 component (A and B isomers, and apiose and xylose isomers: desglucosyl-QS-17 2148 A V1, desglucosyl-QS-17 2148 A V2, desglucosyl-QS-17 2148 B V1 and desglucosyl-QS-17 2148 B V2).

[1455] The term QS-17 family components as used herein means the xylose chemotype QS-17 2296 component (A and B isomers, and apiose and xylose isomers: QS-17 2296 A V1, QS-17 2296 A V2, QS-17 2296 B V1 and QS-17 2296 B V2), the xylose chemotype QS-17 2164 component (A and B isomers: QS-17 2164 A and QS-17 2164 B), the rhamnose chemotype QS-17 2310 component (A and B isomers, and apiose and xylose isomers: QS-17 2310 A V1, QS-17 2310 A V2, QS-17 2310 B V1 and QS-17 2310 B V2).

[1456] The term QS-21 family components as used herein means the xylose chemotype QS-21 1988 component (A and B isomers, and apiose and xylose isomers: QS-21 1988 A V1, QS-21 1988 A V2, QS-21 1988 B V1 and QS-21 1988 B V2), the xylose chemotype QS-21 1856 component (A and B isomers: QS-21 1856 A and QS-21 1856 B), the rhamnose chemotype QS-21 2002 component (A and B isomers, and apiose and xylose isomers: QS-21 2002 A V1, QS-21 2002 A V2, QS-21 2002 B V1 and QS-21 2002 B V2).

[1457] The term desarabinofuranosyl-QS-18 family components as used herein means the xylose chemotype desarabinofuranosyl-QS-18 2018 component (A and B isomers, and apiose and xylose isomers: desarabinofuranosyl-QS-18 2018 A V1, desarabinofuranosyl-QS-18 2018 A V2, desarabinofuranosyl-QS-18 2018 B V1 and desarabinofuranosyl-QS-18 2018 B V2), the xylose chemotype desarabinofuranosyl-QS-18 1886 component (A and B isomers: desarabinofuranosyl-QS-18 1886 A and desarabinofuranosyl-QS-18 1886 B), the rhamnose chemotype desarabinofuranosyl-QS-18 2032 component (A and B isomers, and apiose and xylose isomers: desarabinofuranosyl-QS-18 2032 A V1, desarabinofuranosyl-QS-18 2032 A V2, desarabinofuranosyl-QS-18 2032 B V1 and desarabinofuranosyl-QS-18 2032 B V2).

[1458] The term acetylated desglucosyl-QS-17 family components as used herein means xylose chemotype acetylated desglucosyl-QS-17 2176 component (apiose and xylose isomers: acetylated desglucosyl-QS-17 2176 A V1 and acetylated desglucosyl-QS-17 2176 A V2), the xylose chemotype acetylated desglucosyl-QS-17 2044 A component, the rhamnose chemotype acetylated desglucosyl-QS-17 2190 component (apiose and xylose isomers: acetylated desglucosyl-QS-17 2190 A V1 and acetylated desglucosyl-QS-17 2190 A V2).

[1459] The term desarabinofuranosyl-QS-21 family components as used herein means xylose chemotype desarabinofuranosyl-QS-21 1856 component (A and B isomers, and apiose and xylose isomers: desarabinofuranosyl-QS-21 1856 A V1, desarabinofuranosyl-QS-21 1856 A V2, desarabinofuranosyl-QS-21 1856 B V1 and desarabinofuranosyl-QS-21 1856 B V2), the xylose chemotype desarabinofuranosyl-QS-21 1712 component (A and B isomers: desarabinofuranosyl-QS-21 1712 A and desarabinofuranosyl-QS-21 1712 B), the rhamnose chemotype desarabinofuranosyl-QS-21 1870 component (A and B isomers, and apiose and xylose isomers: desarabinofuranosyl-QS-21 1870 A V1, desarabinofuranosyl-QS-21 1870 A V2, desarabinofuranosyl-QS-21 1870 B V1 and desarabinofuranosyl-QS-21 1870 B V2).

[1460] The term acetylated QS-21 family components as used herein means xylose chemotype acetylated QS-21 2030 component (apiose and xylose isomers: acetylated QS-21 2030 A V1 and acetylated QS-21 2030 A V2), the xylose chemotype acetylated QS-21 1898 A component, the rhamnose chemotype acetylated QS-21 2044 component (apiose and xylose isomers: acetylated QS-21 2044 A V1 and acetylated QS-21 2044 A V2).

### Starting Materials

[1461] Suitably a starting saponin is obtained by extraction from a starting material. The starting material may be plant material obtained from plants of the genera Gypsophilia, Saponaria or Quillaja (Bomford, 1992), such as plant material obtained from plants of Quillaja species. Particular plant material includes that obtained from Quillaja brasiliensis or Quillaja saponaria. In one embodiment the plant material is obtained from Quillaja saponaria. In one embodiment the plant material is obtained from Quillaja brasiliensis.

[1462] Extraction may be from complete plants. Alternatively, extraction may be from selected plant tissues. Extraction from selected plant tissues may be from plant material including wood or bark, such as from plant material which is wood or bark. In some embodiments, extraction is from plant material including bark, such as from plant material which is bark.

[1463] Extraction may be from plant material obtained from an adult plant. Alternatively, extraction may be from plant material obtained from a young plant, such as plants of less than 5 years old, such as less than 3 years old. (Schlotterbeck, 2015; WO2018057031)

[1464] Extraction may be performed using water or lower alcohols (e.g. methanol or ethanol) as solvents, including mixtures thereof. In one embodiment the starting saponin is obtained by aqueous extraction (e.g. using solvent comprising at least 80% v/v water, especially at least 90% v/v water, such as at least 95% v/v water). In one embodiment the starting saponin is obtained by methanol extraction (e.g. using solvent comprising at least 80% v/v methanol, especially at least 90% v/v methanol, such as at least 95% v/v methanol). In one embodiment the starting saponin is obtained by ethanol extraction (e.g. using solvent comprising at least 80% v/v ethanol, especially at least 90% v/v ethanol, such as at least 95% v/v ethanol). In one embodiment the starting saponin is obtained by methanol/ethanol extraction (e.g. using solvent comprising at least 20% v/v methanol, especially at least 30% v/v methanol, such as at least 40% v/v methanol and at least 20% ethanol, especially at least 30% v/v ethanol, such as at least 40% v/v ethanol). In one embodiment the starting saponin is obtained by water/ethanol extraction (e.g. using solvent comprising at least 20% v/v water, especially at least 30% v/v water, such as at least 40% v/v water and at least 20% ethanol, especially at least 30% v/v ethanol, such as at least 40% v/v ethanol. In one embodiment the starting saponin is obtained by water/methanol extraction (e.g. using solvent comprising at least 20% v/v water, especially at least 30% v/v water, such as at least 40% v/v water and at least 20% methanol, especially at least 30% v/v methanol, such as at least 40% v/v methanol).

[1465] Methods of the invention may be applied to starting saponin in a range of contexts. A starting saponin may be in the form of a minor component in a saponin containing composition (ignoring solvents, if any), such as a minor component of a plant material extract. A starting saponin may be in the form of a major component in a saponin containing composition, such as a major component in a plant material extract. A starting saponin may be in the form of a minor component in a processed, such as partially purified, plant material extract. A starting saponin may be in the form of a major component in a processed, such as partially purified, plant material extract. In some embodiments the starting saponin is substantially purified at the time of enzymatic modification.

[1466] Purification refers to the isolation of a component from other components. Partial purification therefore means the isolation of a components, to some degree, from other components. Substantial purification means the substantial isolation of a component from other components, such as wherein the component comprises at least 50% w/w, especially as at least 70%, particularly at least 80%, for example at least 90% of the component content (50%, 70%, 80% and 90% purity, respectively). Partial purification, in relation to an extract, means the isolation of the starting saponin, to some degree, from other extracted components. Substantially purified, in relation to an extract, means the substantial isolation of the starting saponin from other extracted components, such as wherein the starting saponin comprises at least 50% w/w, especially as at least 70%, particularly at least 80%, for example at least 90% of the extracted component content. Partial or substantial purification can be undertaken through various means including chromatography, filtration over semi-permeable membranes, treatment with selective adsorbants such as polyvinylpolypyrrolidone (PVPP) and the like.

[1467] Although a starting saponin may be a specific chemical entity, in many circumstances involving saponins obtained by extraction a plurality of starting saponins may be present, these being enzymatically modified to provide their corresponding product saponins. As mentioned above for individual saponins, the invention may be applied to a plurality of starting saponins in a range of contexts mutatis mutandis. A plurality of starting saponins comprising related starting saponins may undergo equivalent enzymatic modification concurrently. A plurality of starting saponins comprising distinguishable starting saponins may undergo different enzymatic modifications concurrently (in the presence of more than one enzyme) or in series (sequential treatment with separate enzymes). A plurality of starting saponins may contain both related and distinguishable starting saponins.

[1468] Methods of the invention may be applied to a starting saponin in the form of a component of:
[1469] crude extract, such as water and/or lower alcohol extract, especially aqueous extract;
[1470] crude bark extract (CBE), such as water and/or lower alcohol bark extract, especially aqueous bark extract;
[1471] partially purified extract, such as water and/or lower alcohol extract, especially aqueous extract;
[1472] partially purified bark extract, such as water and/or lower alcohol bark extract, especially aqueous bark extract;
[1473] PVPP treated extract, such as PVPP treated water and/or lower alcohol extract, especially PVPP treated aqueous extract;
[1474] PVPP treated bark extract (TBE), such as PVPP treated water and/or lower alcohol bark extract, especially PVPP treated aqueous bark extract;
[1475] Quil A;
[1476] Fraction A;
[1477] Fraction B (see Nyberg 2003);
[1478] Fraction C;
[1479] QS-7;
[1480] QS-17;
[1481] QS-18; or
[1482] QS-21.

[1483] Methods of the invention may be applied to a starting saponin in a composition comprising:
[1484] QS-7 family components and QS-18 family components;
[1485] QS-7 family components and QS-17 family components;
[1486] QS-17 family components and QS-18 family components;
[1487] QS-7 family components, QS-17 family components and QS-18 family components.

[1488] As with other QS families, the QS-7 family components contains a plurality of related structures including xylose and rhamnose chemotypes, xylose and apiose isomers, A and B isomers:

[chemical structure]

Certain QS-7 family compounds may lack glucose, or the rhamnose attached to the beta-D-fuc.

### Enzymatic Modifications

[1489] The present invention provides the enzymatic modification of saponins. Enzymatic modifications envisaged in the present invention include the conversion of a starting saponin into a product saponin by the removal of one or more sugar residues from the starting saponin. Suitably the enzymatic modifications envisaged in the present invention are the conversion of a starting saponin into a product saponin by the removal of one or more sugar residues from the starting saponin.

[1490] In certain embodiments the enzymatic modification involves the removal of a single sugar residue i.e. removal of a terminal sugar residue (‘exo’ action) from a starting saponin. In other embodiments enzymatic conversion involves the removal of a plurality of sugar residues from a starting saponin i.e. cleavage at a saccharide linkage other than in a terminal location (‘endo’ action), resulting in removal of a plurality of sugar residues (such as 2, 3 or 4 sugar residues) attached through said saccharide linkage.

[1491] Particular sugar residues which may be removed comprise (such as consist of):
[1492] glucose, in particular a terminal glucose, especially a beta-glucose, such as a beta-glucose from a quillaic acid glycoside, for example the beta-D-glucose residue highlighted below:
[1493] rhamnose, in particular a terminal rhamnose, especially an alpha-rhamnose, such as an alpha-rhamnose from a quillaic acid glycoside, for example the alpha-L-rhamnose residues highlighted below:
[1494] in particular

[1495] Particular single sugar enzymatic conversions of interest include:
[1496] QS-18 family components to QS-21 family components, such as:
   [1497] QS-18 2150 component (i.e. QS-18 2150 A and/or QS-18 2150 B) to QS-21 1988 component, such as:
      [1498] QS-18 2150 A component to QS-21 1988 A component, such as:
         [1499] QS-18 2150 A V1 to QS-21 1988 A V1
         [1500] QS-18 2150 A V2 to QS-21 1988 A V2
      [1501] QS-18 2150 B component to QS-21 1988 B component, such as:
         [1502] QS-18 2150 B V1 to QS-21 1988 B V1
         [1503] QS-18 2150 B V2 to QS-21 1998 B V2
      [1504] QS-18 2150 V1 component (i.e. QS-18 2150 A V1 and/or QS-18 2150 B V1) to QS-21 1988 V1 component, such as:
         [1505] QS-18 2150 A V1 to QS-21 1988 A V1
         [1506] QS-18 2150 B V1 to QS-21 1988 B V1
      [1507] QS-18 2150 V2 component (i.e. QS-18 2150 A V2 and/or QS-18 2150 B V2) to QS-21 1988 V2 component, such as:
         [1508] QS-18 2150 A V2 to QS-21 1988 A V2
         [1509] QS-18 2150 B V2 to QS-21 1988 B V2
   [1510] QS-18 2018 component (i.e. QS-18 2018 A and/or QS-18 2018 B) to QS-21 1856 component, such as:
      [1511] QS-18 2018 A component to QS-21 1856 A component
      [1512] QS-18 2018 B component to QS-21 1856 B component
   [1513] QS-18 2164 component (i.e. QS-18 2164 A and/or QS-18 2164 B) to QS-21 2002 component, such as:
      [1514] QS-18 2164 A component to QS-21 2002 A component, such as:
         [1515] QS-18 2164 A V1 to QS-21 2002 A V1
         [1516] QS-18 2164 A V2 to QS-21 2002 A V2
      [1517] QS-18 2164 B component to QS-21 2002 B component, such as:
         [1518] QS-18 2164 B V1 to QS-21 2002 B V1
         [1519] QS-18 2164 B V2 to QS-21 2002 B V2
      [1520] QS-18 2164 V1 component (i.e. QS-18 2164 A V1 and/or QS-18 2164 B V1) to QS-21 2002 V1 component, such as:
         [1521] QS-18 2164 A V1 to QS-21 2002 A V1
         [1522] QS-18 2164 B V1 to QS-21 2002 B V1
      [1523] QS-18 2164 V2 component (i.e. QS-18 2164 A V2 and/or QS-18 2164 B V2) to QS-21 2002 V2 component, such as:
         [1524] QS-18 2164 A V2 to QS-21 2002 A V2
         [1525] QS-18 2164 B V2 to QS-21 2002 B V2
[1526] desglucosyl-QS-17 family components to QS-21 family components, such as:
   [1527] desglucosyl-QS-17 2134 component (i.e. desglucosyl-QS-17 2134 A and/or desglucosyl-QS-17 2134 B) to QS-21 1988 component, such as:
      [1528] desglucosyl-QS-17 2134 A component to QS-21 1988 A component, such as:
         [1529] desglucosyl-QS-17 2134 A V1 to QS-21 1988 A V1
         [1530] desglucosyl-QS-17 2134 A V2 to QS-21 1988 A V2
      [1531] desglucosyl-QS-17 2134 B component to QS-21 1988 B component, such as:
         [1532] desglucosyl-QS-17 2134 B V1 to QS-21 1988 B V1
         [1533] desglucosyl-QS-17 2134 B V2 to QS-21 1988 B V2
      [1534] desglucosyl-QS-17 2134 V1 component (i.e. desglucosyl-QS-17 2134 A V1 and/or desglucosyl-QS-17 2134 B V1) to QS-21 1988 V1 component, such as:
         [1535] desglucosyl-QS-17 2134 A V1 to QS-21 1988 A V1
         [1536] desglucosyl-QS-17 2134 B V1 to QS-21 1988 B V1
      [1537] desglucosyl-QS-17 2134 V2 component (i.e. desglucosyl-QS-17 2134 A V2 and/or desglucosyl-QS-17 2134 B V2) to QS-21 1988 V2 component, such as:
         [1538] desglucosyl-QS-17 2134 A V2 to QS-21 1988 A V2
         [1539] desglucosyl-QS-17 2134 B V2 to QS-21 1988 B V2
   [1540] desglucosyl-QS-17 2002 component (i.e. desglucosyl-QS-17 2002 A and/or desglucosyl-QS-17 2002 B) to QS-21 1856 component, such as:
      [1541] desglucosyl-QS-17 2002 A component to QS-21 1856 A component
      [1542] desglucosyl-QS-17 2002 B component to QS-21 1856 B component
   [1543] desglucosyl-QS-17 2148 component (i.e. desglucosyl-QS-17 2148 A and/or desglucosyl-QS-17 2148 B) to QS-21 2002 component, such as:
      [1544] desglucosyl-QS-17 2148 A component to QS-21 2002 A component, such as:
         [1545] desglucosyl-QS-17 2148 A V1 to QS-21 2002 A V1
         [1546] desglucosyl-QS-17 2148 A V2 to QS-21 2002 A V2
      [1547] desglucosyl-QS-17 2148 B component to QS-21 2002 B component, such as:
         [1548] desglucosyl-QS-17 2148 B V1 to QS-21 2002 B V1
         [1549] desglucosyl-QS-17 2148 B V2 to QS-21 2002 B V2
      [1550] desglucosyl-QS-17 2134 V1 component (i.e. desglucosyl-QS-17 2134 A V1 and/or desglucosyl-QS-17 2134 B V1) to QS-21 1988 V1 component, such as:
         [1551] desglucosyl-QS-17 2148 A V1 to QS-21 2002 A V1
         [1552] desglucosyl-QS-17 2148 B V1 to QS-21 2002 B V1
      [1553] desglucosyl-QS-17 2134 V2 component (i.e. desglucosyl-QS-17 2134 A V2 and/or desglucosyl-QS-17 2134 B V2) to QS-21 1988 V1 component, such as:
         [1554] desglucosyl-QS-17 2148 A V2 to QS-21 2002 A V2
         [1555] desglucosyl-QS-17 2148 B V2 to QS-21 2002 B V2
[1556] QS-17 family components to QS-18 family components, such as:
   [1557] QS-17 2296 component (i.e. QS-17 2296 A and/or QS-17 2296 B) to QS-18 2150 component, such as:
      [1558] QS-17 2296 A component to QS-18 2150 A component, such as:
         [1559] QS-17 2296 A V1 to QS-18 2150 A V1
         [1560] QS-17 2296 A V2 to QS-18 2150 A V2
      [1561] QS-17 2296 B component to QS-18 2150 B component, such as:
         [1562] QS-17 2296 B V1 to QS-18 2150 B V1
         [1563] QS-17 2296 B V2 to QS-18 2150 B V2
      [1564] QS-17 2296 V1 component (i.e. QS-17 2296 A V1 and/or QS-17 2296 B V1) to QS-18 2150 V1 component, such as:
         [1565] QS-17 2296 A V1 to QS-18 2150 A V1
         [1566] QS-17 2296 B V1 to QS-18 2150 B V1
      [1567] QS-17 2296 V2 component (i.e. QS-17 2296 A V2 and/or QS-17 2296 B V1) to QS-18 2150 V2 component, such as:
         [1568] QS-17 2296 A V2 to QS-18 2150 A V2
         [1569] QS-17 2296 B V2 to QS-18 2150 B V2
   [1570] QS-17 2164 component (i.e. QS-17 2164 A and/or QS-17 2164 B) to QS-18 2018 component, such as:
      [1571] QS-17 2164 A component to QS-18 2018 A component
      [1572] QS-17 2164 B component to QS-18 2018 B component
   [1573] QS-17 2310 component (i.e. QS-17 2310 A and/or QS-17 2310 B) to QS-18 2164 component, such as:
      [1574] QS-17 2310 A component to QS-18 2164 A component, such as:
         [1575] QS-17 2310 A V1 to QS-18 2164 A V1
         [1576] QS-17 2310 A V2 to QS-18 2164 A V2
      [1577] QS-17 2310 B component to QS-18 2164 B component, such as:
         [1578] QS-17 2310 B V1 to QS-18 2164 B V1
         [1579] QS-17 2310 B V2 to QS-18 2164 B V2
      [1580] QS-17 2310 V1 component (i.e. QS-17 2310 A V1 and/or QS-17 2310 B V1) to QS-18 2164 V1 component, such as:
         [1581] QS-17 2310 A V1 to QS-18 2164 A V1
         [1582] QS-17 2310 B V1 to QS-18 2164 B V1
      [1583] QS-17 2310 V2 component (i.e. QS-17 2310 A V2 and/or QS-17 2310 B V2) to QS-18 2164 V2 component, such as:
         [1584] QS-17 2310 A V2 to QS-18 2164 A V2
         [1585] QS-17 2310 B V2 to QS-18 2164 B V2
[1586] QS-17 family components to desglucosyl-QS-17 family components, such as:
   [1587] QS-17 2296 component (i.e. QS-17 2296 A and/or QS-17 2296 B) to desglucosyl-QS-17 2134 component, such as:
      [1588] QS-17 2296 A component to desglucosyl-QS-17 2134 A component, such as:
         [1589] QS-17 2296 A V1 to desglucosyl-QS-17 2134 A V1
         [1590] QS-17 2296 A V2 to desglucosyl-QS-17 2134 A V2
      [1591] QS-17 2296 B component to desglucosyl-QS-17 2134 B component, such as:
         [1592] QS-17 2296 B V1 to desglucosyl-QS-17 2134 B V1
         [1593] QS-17 2296 B V2 to desglucosyl-QS-17 2134 B V2
      [1594] QS-17 2296 V1 component (i.e. QS-17 2296 A V1 and/or QS-17 2296 B V1) to desglucosyl-QS-17 2134 V1 component, such as:
         [1595] QS-17 2296 A V1 to desglucosyl-QS-17 2134 A V1
         [1596] QS-17 2296 B V1 to desglucosyl-QS-17 2134 B V1
      [1597] QS-17 2296 V2 component (i.e. QS-17 2296 A V2 and/or QS-17 2296 B V1) to desglucosyl-QS-17 2134 V2 component, such as:
         [1598] QS-17 2296 A V2 to desglucosyl-QS-17 2134 A V2
         [1599] QS-17 2296 B V2 to desglucosyl-QS-17 2134 B V2
   [1600] QS-17 2164 component (i.e. QS-17 2164 A and/or QS-17 2164 B) to desglucosyl-QS-17 2002 component, such as:
      [1601] QS-17 2164 A component to desglucosyl-QS-17 2002 A
      [1602] QS-17 2164 B component to desglucosyl-QS-17 2002 B
   [1603] QS-17 2310 component (i.e. QS-17 2310 A and/or QS-17 2310 B) to desglucosyl-QS-17 2148 component, such as:
      [1604] QS-17 2310 A component to desglucosyl-QS-17 2148 A component, such as:
         [1605] QS-17 2310 A V1 to desglucosyl-QS-17 2148 A V1
         [1606] QS-17 2310 A V2 to desglucosyl-QS-17 2148 A V2
      [1607] QS-17 2310 B component to QS-21, such as:
         [1608] QS-17 2310 B V1 to desglucosyl-QS-17 2148 B V1
         [1609] QS-17 2310 B V2 to desglucosyl-QS-17 2148 B V2
      [1610] QS-17 2310 V1 component (i.e. QS-17 2310 A V1 and/or QS-17 2310 B V1) to desglucosyl-QS-17 2148 V1 component, such as:
         [1611] QS-17 2310 A V1 to desglucosyl-QS-17 2148 A V1
         [1612] QS-17 2310 B V1 to desglucosyl-QS-17 2148 B V1
      [1613] QS-17 2310 V2 component (i.e. QS-17 2310 A V2 and/or QS-17 2310 B V2) to desglucosyl-QS-17 2148 V2 component, such as:
         [1614] QS-17 2310 A V2 to desglucosyl-QS-17 2148 A V2
         [1615] QS-17 2310 B V2 to desglucosyl-QS-17 2148 B V2
            Other single sugar enzymatic conversions of interest include:
[1616] desarabinofuranosyl-QS-18 family components to desarabinofuranosyl-QS-21 family components, such as:
   [1617] desarabinofuranosyl-QS-18 2018 component (i.e. desarabinofuranosyl-QS-18 2018 A and/or desarabinofuranosyl-QS-18 2018 B) to desarabinofuranosyl-QS-21 1856 component, such as:
      [1618] desarabinofuranosyl-QS-18 2018 A component to desarabinofuranosyl-QS-21 1856 A component, such as:
         [1619] desarabinofuranosyl-QS-18 2018 A V1 to desarabinofuranosyl-QS-21 1856 A V1
         [1620] desarabinofuranosyl-QS-18 2018 A V2 to desarabinofuranosyl-QS-21 1856 A V2
      [1621] desarabinofuranosyl-QS-18 2018 B component to desarabinofuranosyl-QS-21 1856 B component, such as:
         [1622] desarabinofuranosyl-QS-18 2018 B V1 to desarabinofuranosyl-QS-21 1856 B V1
         [1623] desarabinofuranosyl-QS-18 2018 B V2 to desarabinofuranosyl-QS-21 1856 B V2
      [1624] desarabinofuranosyl-QS-18 2018 V1 component (i.e. desarabinofuranosyl-QS-18 2018 A V1 and/or desarabinofuranosyl-QS-18 2018 B V1) to desarabinofuranosyl-QS-21 1856 V1 component, such as:
         [1625] desarabinofuranosyl-QS-18 2018 A V1 to desarabinofuranosyl-QS-21 1856 A V1
         [1626] desarabinofuranosyl-QS-18 2018 B V1 to desarabinofuranosyl-QS-21 1856 B V1
      [1627] desarabinofuranosyl-QS-18 2018 V2 component (i.e. desarabinofuranosyl-QS-18 2018 A V2 and/or desarabinofuranosyl-QS-18 2018 B V2) to desarabinofuranosyl-QS-21 1856 V2 component, such as:
         [1628] desarabinofuranosyl-QS-18 2018 A V2 to desarabinofuranosyl-QS-21 1856 A V2
         [1629] desarabinofuranosyl-QS-18 2018 B V2 to desarabinofuranosyl-QS-21 1856 B V2
   [1630] desarabinofuranosyl-QS-18 1886 component (i.e. desarabinofuranosyl-QS-18 1886 A and/or desarabinofuranosyl-QS-18 1886 B) to desarabinofuranosyl-QS-21 1712 component, such as:
      [1631] desarabinofuranosyl-QS-18 1886 A component to desarabinofuranosyl-QS-21 1712 A
      [1632] desarabinofuranosyl-QS-18 1886 B component to desarabinofuranosyl-QS-21 1712 B
   [1633] desarabinofuranosyl-QS-18 2032 component (i.e. desarabinofuranosyl-QS-18 2032 A and/or desarabinofuranosyl-QS-18 2032 B) to desarabinofuranosyl-QS-21 1870 component, such as:
      [1634] desarabinofuranosyl-QS-18 2032 A component to desarabinofuranosyl-QS-21 1870 A component, such as:
         [1635] desarabinofuranosyl-QS-18 2032 A V1 to desarabinofuranosyl-QS-21 1870 A V1
         [1636] desarabinofuranosyl-QS-18 2032 A V2 to desarabinofuranosyl-QS-21 1870 A V2
      [1637] desarabinofuranosyl-QS-18 2032 B component to QS-21, such as:
         [1638] desarabinofuranosyl-QS-18 2032 B V1 to desarabinofuranosyl-QS-21 1870 B V1
         [1639] QS-17 desarabinofuranosyl-QS-18 2032 B V2 to desarabinofuranosyl-QS-21 1870 B V2
      [1640] desarabinofuranosyl-QS-18 2032 V1 component (i.e. desarabinofuranosyl-QS-18 2032 A V1 and/or desarabinofuranosyl-QS-18 2032 B V1) to desarabinofuranosyl-QS-21 1870 V1 component, such as:
         [1641] desarabinofuranosyl-QS-18 2032 A V1 to desarabinofuranosyl-QS-21 1870 A V1
         [1642] desarabinofuranosyl-QS-18 2032 B V1 to desarabinofuranosyl-QS-21 1870 B V1
      [1643] desarabinofuranosyl-QS-18 2032 V2 component (i.e. desarabinofuranosyl-QS-18 2032 A V2 and/or desarabinofuranosyl-QS-18 2032 B V2) to desarabinofuranosyl-QS-21 1870 V2 component, such as:
         [1644] desarabinofuranosyl-QS-18 2032 A V2 to desarabinofuranosyl-QS-21 1870 A V2
         [1645] desarabinofuranosyl-QS-18 2032 B V2 to desarabinofuranosyl-QS-21 1870 B V2
[1646] acetylated desglucosyl-QS-17 components to acetylated QS-21 family components, such as:
   [1647] acetylated desglucosyl-QS-17 2176 A to acetylated QS-21 2030 A, such as:
      [1648] acetylated desglucosyl-QS-17 2176 A V1 to acetylated QS-21 2030 A V1
      [1649] acetylated desglucosyl-QS-17 2176 A V2 to acetylated QS-21 2030 A V2
   [1650] acetylated desglucosyl-QS-17 2044 A to acetylated QS-21 1898 A component
   [1651] acetylated desglucosyl-QS-17 2190 A to acetylated QS-21 2044 A, such as:
      [1652] acetylated desglucosyl-QS-17 2190 A V1 to acetylated QS-21 2044 A V1
      [1653] acetylated desglucosyl-QS-17 2190 A V2 to acetylated QS-21 2044 A V2.

[1654] Enzymatic conversions may be applied to a single starting saponin or a plurality of starting saponins in parallel. It will be appreciated that a process may comprise or consist of the conversions specified above, depending on the composition of the starting material and the enzymes used. Furthermore, while a process may be limited to the use of a single enzyme intended to remove a particular sugar residue or group of sugar residues from (i) a single starting saponin, (ii) a family of starting saponins, or (iii) from a plurality of families of starting saponins; processes may also use a plurality of enzymes intended to remove a plurality of sugar residues from (i) a single starting saponin, (ii) a family of starting saponins, or (iii) from a plurality of families of starting saponins. Processes involving multiple enzymes may be undertaken in series (i.e. a single enzyme is applied to saponin material at any time) or in parallel (i.e. more than one enzyme is applied to saponin material at any time, such as two or three enzymes, in particular two enzymes), or combinations thereof.

[1655] Processes involving the removal of multiple sugar residues may involve the removal of single (but different) sugar residues from multiple starting saponins and/or the removal of multiple sugar residues from particular starting saponins (such as 2, 3 or 4 residues, in particular 2 or 3, especially 2 residues). Removal of multiple sugar residues from particular starting saponins may involve any combination of removal of single residues and/or removal of a plurality of residues in a single cleavage.

[1656] Exemplary processes may comprise (such as consist of) the removal of glucose and rhamnose, in particular an alpha-rhamnose residue and a beta-glucose residue, such as the alpha-L-rhamnose residue and the beta-D-glucose residue from quillaic acid glycosides:

[1657] Particular multi-sugar enzymatic conversions of interest include:
[1658] QS-17 family components to QS-21 family components, such as:
   [1659] QS-17 2296 component (i.e. QS-17 2296 A and/or QS-17 2296 B) to QS-21 1988 component, such as:
      [1660] QS-17 2296 A component to QS-21 1988 A component, such as:
         [1661] QS-17 2296 A V1 to QS-21 1988 A V1
         [1662] QS-17 2296 A V2 to QS-21 1988 A V2
      [1663] QS-17 2296 B component to QS-21 1988 B component, such as:
         [1664] QS-17 2296 B V1 to QS-21 1988 B V1
         [1665] QS-17 2296 B V2 to QS-21 1988 B V2
      [1666] QS-17 2296 V1 component (i.e. QS-17 2296 A V1 and/or QS-17 2296 B V1) to QS-21 1988 V1 component, such as:
         [1667] QS-17 2296 A V1 to QS-21 1988 A V1
         [1668] QS-17 2296 B V1 to QS-21 1988 B V1
      [1669] QS-17 2296 V2 component (i.e. QS-17 2296 A V2 and/or QS-17 2296 B V2) to QS-21 1988 V2 component, such as:
         [1670] QS-17 2296 A V2 to QS-21 1988 A V2
         [1671] QS-17 2296 B V2 to QS-21 1988 B V2
   [1672] QS-17 2164 component (i.e. QS-17 2164 A and/or QS-17 2164 B) to QS-21 1856 component, such as:
      [1673] QS-17 2164 A component to QS-21 1856 A component
      [1674] QS-17 2164 B component to QS-21 1856 B component
   [1675] QS-17 2310 component (i.e. QS-17 2310 A and/or QS-17 2310 B) to QS-21 2002 component, such as:
      [1676] QS-17 2310 A component to QS-21 2002 A component, such as:
         [1677] QS-17 2310 A V1 to QS-21 2002 A V1
         [1678] QS-17 2310 A V2 to QS-21 2002 A V2
      [1679] QS-17 2310 B component to QS-21 2002 B component, such as:
         [1680] QS-17 2310 B V1 to QS-21 2002 B V1
         [1681] QS-17 2310 B V2 to QS-21 2002 B V2
      [1682] QS-17 2310 V1 component (i.e. QS-17 2310 A V1 and/or QS-17 2310 B V1) to QS-21 2002 V1, such as:
         [1683] QS-17 2310 A V1 to QS-21 2002 A V1
         [1684] QS-17 2310 B V1 to QS-21 2002 B V1
      [1685] QS-17 2310 V2 component (i.e. QS-17 2310 A V2 and/or QS-17 2310 B V2) to QS-21 2002 V2, such as:
         [1686] QS-17 2310 A V2 to QS-21 2002 A V2
         [1687] QS-17 2310 B V2 to QS-21 2002 B V2.

[1688] Extracts may contain complex mixtures of saponin components and consequently may experience a plurality of conversions when multiple enzymes are present. For example, a starting mixture containing QS-17, QS-18 and desglucosyl-QS-17 components which is treated with an appropriate beta-glucosidase and alpha-rhamnosidase in parallel may undergo conversions including:
[1689] QS-18 family components to QS-21 family components, especially QS-18 2150 component to QS-21 1988 component;
[1690] desglucosyl-QS-17 family components to QS-21 family components, especially desglucosyl-QS-17 2134 component to QS-21 1988 component;
[1691] QS-17 family components to desglucosyl-QS-17 family components to QS-21 components, especially QS-17 2296 component to desglucosyl-QS-17 2134 component to QS-21 1988 component; and
[1692] QS-17 family components to QS-18 family components to QS-21 family components, especially QS-17 2296 component to QS-18 2150 component to QS-21 1988 component.

### Enzyme Selection

[1693] Extensive protein or DNA databases of natural and artificial glycosidases are available. Candidate enzymes may be selected and screened to assess suitability for achieving a particular conversion under particular reaction conditions. Suitability of an enzyme will depend on a number of factors including:
[1694] target sugar (e.g. glucose, rhamnose)
[1695] target sugar anomer (alpha or beta);
[1696] target sugar enantiomer (D or L);
[1697] target sugar location (endo or exo); and
[1698] target sugar environment (e.g. chemical/physical, impacting accessibility and reactivity).

[1699] Additional factors which facilitate effective conversions include:
[1700] rate of conversion;
[1701] environmental sensitivity—including pH, temperature, substrate, product and contaminant concentration tolerance; and
[1702] specificity for target sugar, including in respect of other sugar residues, other anomers, other sugar residue locations, and between different residues of the same sugar anomer and location within a substrate (if multiple such residues are present).

[1703] Those skilled in the art will appreciate that the level and type of specificity required of an enzyme will depend on the objective to be achieved and the general circumstances.

[1704] Conversion of QS-18 family components to QS-21 family components requires an enzyme demonstrating beta exo glucosidase activity.

[1705] Conversion of QS-17 family components to desglucosyl-QS-17 family components requires an enzyme demonstrating beta exo glucosidase activity.

[1706] Conversion of desglucosyl-QS-17 family components to QS-21 family components requires an enzyme demonstrating alpha exo rhamnosidase activity.

[1707] Conversion of QS-17 family components to QS-18 family components requires an enzyme demonstrating alpha exo rhamnosidase activity.

[1708] It may be noted that many Quillaja saponaria starting saponins of interest contain only one glucose residue. Many Quillaja saponaria starting saponins of interest contain a plurality of rhamnose residues, therefore selectivity for specific rhamnose residues is of greater importance practically. For example, conversion of desglucosyl-QS-17 family components to QS-21 components or QS-17 family components to QS-18 family components requires specificity for exo-rhamnosidase action over endo-rhamnosidase action. Furthermore, rhamnosidase specificity for the alpha-O-rhamnosylation at the C2 position of the arabinofuranose moiety over other terminal rhamnose residues (e.g. in the rhamnose chemotype components) may also be desirable. In certain embodiments it may be desirable to remove the terminal rhamnose from rhamnose chemotype components (alone or in conjunction with any alpha-O-rhamnosylation at the C2 position of the arabinofuranose moiety), to better facilitate their chromatographic separation from xylose chemotype components.

[1709] In one embodiment saponin starting material is subjected to enzymatic modification by a single enzyme. The single enzyme may be a glucosidase, in particular a beta exo glucosidase. A single enzyme glucosidase may be an engineered glucosidase polypeptide of the present invention. Alternatively, the single enzyme is a rhamnosidase, in particular an alpha exo rhamnosidase. A single enzyme rhamnosidase may an engineered rhamnosidase polypeptide of the present invention.

[1710] Preferred enzymes are those which efficiently enzymatically convert a starting saponin(s) to the desired product saponin(s) while demonstrating limited or no undesired conversion(s) of other saponin components present.

[1711] In one embodiment saponin starting material is subjected to enzymatic modification by more than one enzyme, such as by two or three enzymes, especially by two enzymes. Enzymatic modification by more than one enzyme may involve sequential/series enzymatic modification. Alternatively, enzymatic modification by more than one enzyme may involve concurrent/parallel enzymatic modification. Enzymatic modification by at least three enzymes may involve a combination of sequential/series (modification by one enzyme) and concurrent/parallel (modification by at least two other enzymes) enzymatic modification, in any order. Where a plurality of enzymes are provided, these may be as distinct proteins or may be in the form of one or more fusion proteins.

[1712] An enzyme of interest is a glucosidase, such as a beta exo glucosidase. A glucosidase may be an engineered glucosidase polypeptide of the present invention. Another enzyme of interest is a rhamnosidase, such as an alpha exo rhamnosidase. A rhamnosidase may an engineered rhamnosidase polypeptide of the present invention. Enzyme combinations of interest include those comprising, such as consisting of, a glucosidase and a rhamnosidase, in particular a beta exo glucosidase and an alpha exo rhamnosidase. Enzymatic modification involving a glucosidase and a rhamnosidase, in particular a beta exo glucosidase and an alpha exo rhamnosidase, may be undertaken: sequentially with glucosidase (e.g. beta exo glucosidase) followed by rhamnosidase (e.g. alpha exo rhamnosidase), sequentially with rhamnosidase (e.g. alpha exo rhamnosidase) followed by glucosidase (e.g. beta exo glucosidase) or, conveniently, concurrently with both glucosidase (e.g. beta exo glucosidase) and rhamnosidase (e.g. alpha exo rhamnosidase). Particular enzyme combinations of interest are those comprising, such as consisting of, an engineered glucosidase of the present invention and an engineered rhamnosidase polypeptide of the present invention.

[1713] Enzymes utilised will typically be of external origin to saponin material i.e. not naturally found within the source of saponins obtained by extraction.

[1714] Enzymes may be native, i.e. naturally occurring glycosidases, or alternatively may be non-naturally occurring glycosidases. In one embodiment a glucosidase enzyme is a naturally occurring glucosidase (e.g. exo glucosidase, such as beta exo glucosidase). In a second embodiment a glucosidase enzyme is a non-naturally occurring glucosidase (e.g. exo glucosidase, such as beta exo glucosidase). In one embodiment a rhamnosidase enzyme is a naturally occurring rhamnosidase (e.g. exo rhamnosidase, such as alpha exo rhamnosidase). In a second embodiment a rhamnosidase enzyme is a non-naturally occurring rhamnosidase (e.g. exo rhamnosidase, such as alpha exo rhamnosidase).

[1715] Enzymes may be modified relative to a reference enzyme (‘engineered’). Point mutations, either singly or in combination, introduced by engineering may provide benefits such as increased activity, increased specificity, increased stability, increased expression or other the like. Assays to confirm the properties of the enzymes are well known to those skilled in the field. For example, activity may be quantified by methods such as those shown in the examples (see Examples 4 to 7) or by analogous methods.

[1716] Different enzymes may show different sensitivity to environmental conditions, such as pH, temperature, substrate concentration, product concentration, solvent composition, presence of contaminants and the like. Such parameters may be taken into consideration during screening of candidate enzymes for the desired activity.

[1717] Candidate enzymes having beta glucosidase activity include those in EC3.2.1.21.

[1718] Beta exo glucosidases of interest include those described in Table 7, especially SEQ ID Nos. 262, 208, 63, 229, 250, 5, 101, 207, 169, 247, 302, 324, 319, 9, 240, 325 and 338, and functional variants thereof. Particular beta exo glucosidases of interest include SEQ ID Nos. 262, 208, 63, 229, 250, 5, 101, 207, 169, 247, 302, 324 and 319, and functional variants thereof, such as SEQ ID Nos. 262, 208, 63, 229, 250, 5, 101 and 207, and functional variants thereof.

[1719] Another group of beta exo glucosidases of interest include those described in Table 9, especially SEQ ID Nos. 850, 879, 868, 826, 804, 888, 881, 891, 816, 827, 857, 853, 842, 814, 886, 885, 838, 829, 808, 828, 870, 873, 844, 882, 874, 825, 824, 823, 810, 894, 849, 803, 890, 841, 832, 830, 845, 871, 837, 883 and 809, and functional variants thereof. Particular beta exo glucosidases of interest include SEQ ID Nos. 850, 879, 868, 826, 804, 888, 881, 891, 816, 827, 857, 853, 842, 814, 886, 885, 838, 829, 808, 828, 870, 873, 844, 882, 874, 825, 824, 823, 810, 894, 849, 803, 890 and 841, and functional variants thereof, such as SEQ ID Nos. 850, 879, 868, 826, 804, 888, 881, 891, 816, 827, 857, 853, 842, 814, 886, 885, 838, 829, 808, 828, 870, 873, 844, 882, 874, 825, 824, 823, 810 and 894, and functional variants thereof.

[1720] SEQ ID No. 262, and functional variants thereof, are particularly desirable beta exo glucosidases. In one embodiment the beta exo glucosidase comprises, such as consists of: (i) SEQ ID. 262; or (ii) a functional variant thereof having at least 80% identity to SEQ ID. 262, especially at least 90%, in particular at least 95%, such as at least 96%, at least 97%, at least 98%, for example at least 99% identity; or (iii) a functional fragment of at least 100, especially at least 200, particularly at least 300, such as at least 400, for example at least 500 contiguous amino acids of SEQ ID. 262.

[1721] Candidate enzymes having alpha rhamnosidase activity include those in EC3.2.1.40.

[1722] Alpha exo rhamnosidases of interest include SEQ ID Nos. 992, 1003, 1052, 1073, 1017, 1055, 1075, 1001, 1007, 1061, 1079, 1027, 1039, 1041, 989, 1053, 1018, 1066, 1082, 1076, 993, 1077, 1046, 1015, 1063, 1054, 1074, 1067 and 1033, and functional variants thereof. Particular alpha exo rhamnosidases of interest include SEQ ID Nos. 992, 1003, 1052, 1073, 1017, 1055, 1075, 1001, 1007, 1061, 1079, 1027, 1039, 1041, 989, 1053, 1018, 1066, 1082, 1076, 993 and 1077, and functional variants thereof, such as SEQ ID Nos. 992, 1003, 1052, 1073, 1017, 1055, 1075, 1001, 1007, 1061, 1079, 1027, 1039, 1041 and 989, and functional variants thereof.

[1723] SEQ ID No. 1017, and functional variants thereof, are particularly desirable exo rhamnosidases. In one embodiment the alpha exo rhamnosidase comprises, such as consists of: (i) SEQ ID. 1017; or (ii) a functional variant thereof having at least 80% identity to SEQ ID. 1017, especially at least 90%, in particular at least 95%, such as at least 96%, at least 97%, at least 98%, for example at least 99% identity; or (iii) a functional fragment of at least 100, especially at least 200, particularly at least 300, such as at least 400, for example at least 500 contiguous amino acids of SEQ ID. 1017.

[1724] Functional variants of interest in the present application include those comprising, such as consisting of: (i) a sequence having at least 80% identity to the reference sequence, especially at least 90%, in particular at least 95%, such as at least 96%, at least 97%, at least 98%, for example at least 99% identity; or (ii) a fragment of at least 100, especially at least 200, particularly at least 300, such as at least 400, for example at least 500 contiguous amino acids of the reference sequence.

[1725] Certain desirable functional variants of interest include those comprising, such as consisting of, a sequence having 1 to 20 additions, deletions and/or substitutions relative to the reference sequence, especially 1 to 15 additions, deletions and/or substitutions, particularly 1 to additions, deletions and/or substitutions, such as 1 to 5 additions, deletions and/or substitutions.

[1726] The degree of sequence identity may be determined using by the homology alignment algorithm of Needleman and Wunsch, the ClustalW program or the BLASTP algorithm, using default settings. An algorithm using global alignment (Needleman and Wunsch) is preferred.

[1727] “Percentage of sequence identity,” “percent identity,” and “percent identical” are used herein to refer to comparisons between polynucleotide sequences or polypeptide sequences, and are determined by comparing two optimally aligned sequences over a comparison window, wherein the portion of the polynucleotide or polypeptide sequence in the comparison window may comprise additions or deletions (i.e., gaps) as compared to the reference sequence for optimal alignment of the two sequences. The percentage is calculated by determining the number of positions at which either the identical nucleic acid base or amino acid residue occurs in both sequences or a nucleic acid base or amino acid residue is aligned with a gap to yield the number of matched positions, dividing the number of matched positions by the total number of positions in the window of comparison and multiplying the result by 100 to yield the percentage of sequence identity. Determination of optimal alignment and percent sequence identity is performed using the BLAST and BLAST 2.0 algorithms (see, e.g., Altschul, 1990; Altschul, 1997). Software for performing BLAST analyses is publicly available through the National Center for Biotechnology Information website. Briefly, the BLAST analyses involve first identifying high scoring sequence pairs (HSPs) by identifying short words of length W in the query sequence, which either match or satisfy some positive-valued threshold score T when aligned with a word of the same length in a database sequence. T is referred to as, the neighborhood word score threshold (Altschul, supra). These initial neighborhood word hits act as seeds for initiating searches to find longer HSPs containing them. The word hits are then extended in both directions along each sequence for as far as the cumulative alignment score can be increased. Cumulative scores are calculated using, for nucleotide sequences, the parameters M (reward score for a pair of matching residues; always >0) and N (penalty score for mismatching residues; always <0). For amino acid sequences, a scoring matrix is used to calculate the cumulative score. Extension of the word hits in each direction are halted when: the cumulative alignment score falls off by the quantity X from its maximum achieved value; the cumulative score goes to zero or below, due to the accumulation of one or more negative-scoring residue alignments; or the end of either sequence is reached. The BLAST algorithm parameters W, T, and X determine the sensitivity and speed of the alignment. The BLASTN program (for nucleotide sequences) uses as defaults a word length (N) of 11, an expectation (E) of 10, M=5, N=−4, and a comparison of both strands. For amino acid sequences, the BLASTP program uses as defaults a wordlength (W) of 3, an expectation (E) of 10, and the BLOSUM62 scoring matrix (see Henikoff, 1989).

[1728] Numerous other algorithms are available that function similarly to BLAST in providing percent identity for two sequences. Optimal alignment of sequences for comparison can be conducted, e.g., by the local homology algorithm of Smith, 1981, by the homology alignment algorithm of Needleman, 1970, by the search for similarity method of Pearson, 1988, by computerized implementations of these algorithms (GAP, BESTFIT, FASTA, and TFASTA in the GCG Wisconsin Software Package), or by visual inspection (see generally, Current Protocols in Molecular Biology, 1995)). Additionally, determination of sequence alignment and percent sequence identity can employ the BESTFIT or GAP programs in the GCG Wisconsin Software package (Accelrys, Madison WI), using default parameters provided. The ClustalW program is also suitable for determining identity.

[1729] Modestobacter marinus glucosidase (Uniparc reference UPI000260A2FA, Uniprot reference I4EYD5-SEQ ID No. 262 herein) is a naturally occurring glucosidase demonstrating beta exo glucosidase activity and, for example, is capable of the conversion of QS-18 family components to QS-21 family components. Despite its potent activity, the present inventors have found that the properties of wild type Modestobacter marinus glucosidase may be altered by the introduction of one or more mutations.

[1730] The present invention provides an engineered glucosidase polypeptide comprising, such as consisting of, an amino acid sequence that is at least 80%, 85%, 90%, 95%, 96%, 97%, 98%, or 99% identical to the amino acid sequence of SEQ ID No. 262, or a functional fragment thereof, wherein the engineered glucosidase polypeptide includes at least one residue substitution from:
[1731] F44Y;
[1732] V60L;
[1733] G117A;
[1734] F170N;
[1735] V263G or V263L;
[1736] N351H or N351Q;
[1737] A355H, A355I, A355L, A355M, A355R, A355T or A355W;
[1738] A356P;
[1739] R357A, R357C, R357K, R357M or R357Q;
[1740] G362C;
[1741] T365A, T365N or T365S;
[1742] L367C;
[1743] V394R;
[1744] V395Y;
[1745] Q396E, Q396G, Q396N, Q396P, Q396R, Q396S or Q396Y;
[1746] F430W;
[1747] R435F;
[1748] V438T;
[1749] V440F;
[1750] F442M or F442Q;
[1751] G444T;
[1752] A473F or A473R;
[1753] L474C, L474I or L474V;
[1754] I475F;
[1755] L492C, L492G, L492H, L492I, L492N, L492Q, L492V, L492W or L492Y;
[1756] Q493F or Q493H;
[1757] P494H or P494I;
[1758] S495I, S495K or S495Q;
[1759] G496P or G496W;
[1760] D498A, D498E, D498F, D498I, D498K, D498L, D498N, D498P, D498R, D498S, D498T or D498V;
[1761] A502R;
[1762] M504G or M504R;
[1763] L507A or L507R;
[1764] T508M;
[1765] L529M;
[1766] F535P;
[1767] A536D or A536E;
[1768] A537R;
[1769] F541A, F541I, F541L, F541M or F541V;
[1770] L542I;
[1771] Q543G or Q543L;
[1772] E547L; and
[1773] Y585W.

[1774] The glucosidases will contain one to forty-two of the substitutions, such as two, three, four, five, six, seven, eight, nine, ten, eleven, twelve, thirteen, fourteen, fifteen, sixteen, seventeen, eighteen, nineteen, twenty, twenty-one, twenty-two, twenty-three, twenty-four, twenty-five, twenty-six to thirty or thirty-one to forty-three substitutions.

[1775] The present invention also provides an engineered glucosidase polypeptide comprising, such as consisting of, an amino acid sequence that is at least 80%, 85%, 90%, 95%, 96%, 97%, 98%, or 99% identical to the amino acid sequence of SEQ ID No. 262, or a functional fragment thereof, wherein the engineered glucosidase polypeptide includes at least one residue substitution from:
[1776] F44Y;
[1777] V263L;
[1778] N351H;
[1779] A355H, A355M or A355W;
[1780] R357M;
[1781] T365N;
[1782] L367C;
[1783] Q396R;
[1784] V438T;
[1785] F442Q;
[1786] L474C;
[1787] I475F;
[1788] L492V, L492N or L492H,
[1789] M504R;
[1790] L507R; and
[1791] F541I.

[1792] The glucosidases will contain one, two, three, four, five, six, seven, eight, nine, ten, eleven, twelve, thirteen, fourteen, fifteen or all sixteen substitutions.

[1793] The engineered glucosidase polypeptide may comprise, such as consist of, an amino acid sequence that is at least 80%, 85%, 90%, 95%, 96%, 97%, 98%, or 99% identical to the amino acid sequence of SEQ ID No. 262, or a functional fragment thereof, wherein the engineered glucosidase polypeptide includes at least one residue substitution from: F44Y, V263L, A355W, R357M, T365N, L367C, Q396R, F442Q, L474C, I475F and F541I.

[1794] Suitably the engineered glucosidase polypeptide comprises, such as consists of, an amino acid sequence that is at least 80%, 85%, 90%, 95%, 96%, 97%, 98%, or 99% identical to the amino acid sequence of SEQ ID No. 262, or a functional fragment thereof, wherein the engineered glucosidase polypeptide includes the residue substitutions: F44Y, V263L, A355W, R357M, T365N, L367C, Q396R, F442Q, L474C, I475F and F541I.

[1795] The present invention provides a polypeptide comprising an amino acid sequence of sequence of SEQ ID No. 262 with one to twenty-five mutations selected from the list consisting of:
[1796] (i) F44Y
[1797] (ii) V263L
[1798] (iii) N351H
[1799] (iv) A355H, A355I, A355L, A355M, A355R, A355T or A355W
[1800] (v) A356P
[1801] (vi) R357M
[1802] (vii) T365N
[1803] (viii) L3670
[1804] (ix) F442Q
[1805] (x) G443D
[1806] (xi) A473F
[1807] (xii) L474O
[1808] (xiii) I475F
[1809] (xiv) L492H, L492N, L492V
[1810] (xv) P494I
[1811] (xvi) G496P
[1812] (xvii) D498P
[1813] (xviii) M504R
[1814] (xix) L507R
[1815] (xx) F535P
[1816] (xxi) A537R
[1817] (xxii) F541I
[1818] (xxiii) L542I;
[1819] (xxiv) E547L and
[1820] (xxv) E588K.

[1821] Variant glucosidases will contain one, two, three, four, five, six, seven, eight, nine, ten, eleven, twelve, thirteen, fourteen, fifteen, sixteen, seventeen, eighteen, nineteen, twenty, twenty-one, twenty-two, twenty-three, twenty-four or all twenty-five mutations.

[1822] In some embodiments an engineered glucosidase is not a polypeptide comprising an amino acid sequence of sequence of SEQ ID No. 262 with one to twenty-five mutations selected from the list consisting of:
[1823] (i) F44Y
[1824] (ii) V263L
[1825] (iii) N351H
[1826] (iv) A355H, A355I, A355L, A355M, A355R, A355T or A355W
[1827] (v) A356P
[1828] (vi) R357M
[1829] (vii) T365N
[1830] (viii) L367C
[1831] (ix) F442Q
[1832] (x) G443D
[1833] (xi) A473F
[1834] (xii) L474C
[1835] (xiii) I475F
[1836] (xiv) L492H, L492N, L492V
[1837] (xv) P494I
[1838] (xvi) G496P
[1839] (xvii) D498P
[1840] (xviii) M504R
[1841] (xix) L507R
[1842] (xx) F535P
[1843] (xxi) A537R
[1844] (xxii) F541I
[1845] (xxiii) L542I
[1846] (xxiv) E547L and
[1847] (xxv) E588K.

[1848] The above-mentioned engineered glucosidase polypeptides may also be referred to herein as examples of ‘variant glucosidases’.

[1849] A variant glucosidase may contain F44Y.

[1850] A variant glucosidase may contain V60L.

[1851] A variant glucosidase may contain G117A.

[1852] A variant glucosidase may contain F170N.

[1853] A variant glucosidase may contain V263G or V263L, in particular V263L.

[1854] A variant glucosidase may contain N351H or N351Q, in particular N351H.

[1855] A variant glucosidase may contain A355H, A355I, A355L, A355M, A355R, A355T or A355W. In some embodiments a variant glucosidase contains A355H. In some embodiments a variant glucosidase contains A355I. In some embodiments a variant glucosidase contains A355L. In some embodiments a variant glucosidase contains A355M. In some embodiments a variant glucosidase contains A355R. In some embodiments a variant glucosidase contains A355T. In some embodiments a variant glucosidase contains A355W.

[1856] A variant glucosidase may contain A356P.

[1857] A variant glucosidase may contain R357A, R357C, R357K, R357M or R357Q, in particular R357M.

[1858] A variant glucosidase may contain G362C.

[1859] A variant glucosidase may contain T365A, T365N or T365S, in particular T365N.

[1860] A variant glucosidase may contain L367C.

[1861] A variant glucosidase may contain V394R.

[1862] A variant glucosidase may contain V395Y.

[1863] A variant glucosidase may contain Q396E, Q396G, Q396N, Q396P, Q396R, Q396S or Q396Y, in particular Q396R.

[1864] A variant glucosidase may contain F430W.

[1865] A variant glucosidase may contain R435F.

[1866] A variant glucosidase may contain V438T.

[1867] A variant glucosidase may contain V440F.

[1868] A variant glucosidase may contain F442M or F442Q, in particular F442Q.

[1869] A variant glucosidase may contain G443D.

[1870] A variant glucosidase may contain G444T.

[1871] A variant glucosidase may contain A473F or A473R, in particular A473F.

[1872] A variant glucosidase may contain L474O, L474I or L474V, in particular L474C.

[1873] A variant glucosidase may contain I475F.

[1874] A variant glucosidase may contain L4920, L492G, L492H, L492I, L492N, L492Q, L492V, L492W or L492Y, in particular L492H, L492N, L492V. In some embodiments a variant glucosidase contains L492H. In some embodiments a variant glucosidase contains L492N. In some embodiments a variant glucosidase contains L492V.

[1875] A variant glucosidase may contain Q493F or Q493H.

[1876] A variant glucosidase may contain P494H or P494I, in particular P494I.

[1877] A variant glucosidase may contain S495I, S495K or S495Q.

[1878] A variant glucosidase may contain G496P or G496W, in particular G496P.

[1879] A variant glucosidase may contain D498A, D498E, D498F, D498I, D498K, D498L, D498N, D498P, D498R, D498S, D498T or D498V, in particular D498P.

[1880] A variant glucosidase may contain A502R.

[1881] A variant glucosidase may contain M504G or M504R, in particular M504R.

[1882] A variant glucosidase may contain L507A or L507R, in particular L507R.

[1883] A variant glucosidase may contain T508M.

[1884] A variant glucosidase may contain L529M.

[1885] A variant glucosidase may contain F535P.

[1886] A variant glucosidase may contain A536D or A536E.

[1887] A variant glucosidase may contain A537R.

[1888] A variant glucosidase may contain F541A, F541I, F541L, F541M or F541V, in particular F541I.

[1889] A variant glucosidase may contain L542I.

[1890] A variant glucosidase may contain Q543G or Q543L.

[1891] A variant glucosidase may contain E547L.

[1892] A variant glucosidase may contain Y585W.

[1893] A variant glucosidase may contain E588K.

[1894] Variant glucosidases may comprise R357M, T365N, A473F, L474O and I475F.

[1895] Variant glucosidases may comprise F44Y, R357M, T365N, F442Q, A473F, L474O and I475F.

[1896] Variant glucosidases may comprise F44Y, V263L, R357M, T365N, F442Q, A473F, L474C, I475F and F541I.

[1897] Variant glucosidases may comprise F44Y, V263L, A355W, R357M, T365N, L367C, Q396R, F442Q, L474O, I475F and F541I.

[1898] Variant glucosidases may comprise F44Y, V263L, R357M, T365N, F442Q, L474O, I475F, F541I and zero to seventeen mutations selected from the list consisting of:
[1899] (iii) N351H
[1900] (iv) A355H, A355I, A355L, A355M, A355R, A355T or A355W
[1901] (v) A356P
[1902] (viii) L367C
[1903] (x) G443D
[1904] (xi) A473F
[1905] (xiv) L492H, L492N, L492V
[1906] (xv) P494I
[1907] (xvi) G496P
[1908] (xvii) D498P
[1909] (xviii) M504R
[1910] (xix) L507R
[1911] (xx) F535P
[1912] (xxi) A537R
[1913] (xxiii) L542I
[1914] (xxiv) E547L and
[1915] (xxv) E588K.

[1916] A variant glucosidase may comprise a “tag,” a sequence of amino acids that allows for the isolation and/or identification of the polypeptide. For example, adding an affinity tag can be useful in purification. Exemplary affinity tags that can be used include histidine (HIS) tags (e.g., hexa histidine-tag, or 6×His-Tag), FLAG-TAG, and HA tags. Tags may be located N-terminally or C-terminally and may be directly connected or attached via a linking sequence. SEQ ID No. 1177 provides a sequence for an exemplary 6×His-Tag with linker sequence which may be N-terminally attached. SEQ ID No. 1178 provides a sequence for an exemplary 6×His-Tag with linker sequence which may be C-terminally attached.

[1917] In certain embodiments, the tags used herein are removable, e.g., removal by chemical agents or by enzymatic means, once they are no longer needed, e.g., after the polypeptide has been purified.

[1918] A variant glucosidase may comprise 1000 residues or fewer, especially 950 residues or fewer, in particular 900 residues or fewer, such as 850 residues or fewer.

[1919] A variant glucosidase may consist of an amino acid sequence of SEQ ID No. 262 with one to twenty-five mutations selected from the list consisting of:
[1920] (i) F44Y
[1921] (ii) V263L
[1922] (iii) N351H
[1923] (iv) A355H, A355I, A355L, A355M, A355R, A355T or A355W
[1924] (v) A356P
[1925] (vi) R357M
[1926] (vii) T365N
[1927] (viii) L367C
[1928] (ix) F442Q
[1929] (x) G443D
[1930] (xi) A473F
[1931] (xii) L474C
[1932] (xiii) I475F
[1933] (xiv) L492H, L492N, L492V
[1934] (xv) P494I
[1935] (xvi) G496P
[1936] (xvii) D498P
[1937] (xviii) M504R
[1938] (xix) L507R
[1939] (xx) F535P
[1940] (xxi) A537R
[1941] (xxii) F541I
[1942] (xxiii) L542I
[1943] (xxiv) E547L and
[1944] (xxv) E588K.

[1945] Variant glucosidases desirably demonstrate a FIOP (Fold Improvement Over Parent) relative to SEQ ID No. 262 of at least 1.05, especially at least 2, in particular at least 10, such as at least 50. FIOP may be determined by the methods described in Example 4.

[1946] Kribbella flavida rhamnosidase (Uniparc reference UPI00019BDB13, Uniprot reference D2PMT5—SEQ ID No. 1017 herein) is a naturally occurring rhamnosidase demonstrating alpha exo rhamnosidase activity and, for example, is capable of the conversion of desglucosyl-QS-17 family components to QS-21 family components. Despite its potent activity, the present inventors have found that the properties of wild type Kribbella flavida rhamnosidase may be altered by the introduction of one or more mutations.

[1947] The present invention provides an engineered rhamnosidase polypeptide comprising, such as consisting of, an amino acid sequence that is at least 80%, 85%, 90%, 95%, 96%, 97%, 98%, or 99% identical to the amino acid sequence of SEQ ID No. 1017, or a functional fragment thereof, wherein the engineered rhamnosidase polypeptide includes at least one residue substitution from:
[1948] (i) A56C
[1949] (ii) A143P
[1950] (iii) Q181H, Q181R or Q181S
[1951] (v) G215S
[1952] (vi) F216M
[1953] (vii) G218D or G218N
[1954] (viii) K219G
[1955] (ix) A238M
[1956] (x) T252Y
[1957] (xi) T311W
[1958] (xii) V326C
[1959] (xiii) G357C
[1960] (xiv) S369C, S369I, S369K or S369M
[1961] (xv) I487M, I487Q or I487V
[1962] (xvi) K492N
[1963] (xvii) V499T
[1964] (xviii) G508S
[1965] (xix) R543C
[1966] (xx) L557Y
[1967] (xxi) G634A
[1968] (xxii) S635N
[1969] (xxiii) A690C and
[1970] (xxiv) Q921H.

[1971] Consequently, the present invention provides a polypeptide comprising an amino acid sequence of sequence of SEQ ID No. 1017 with one to twenty-four mutations selected from the list consisting of:
[1972] (i) A56C
[1973] (ii) A143P
[1974] (iii) Q181H, Q181R or Q181S
[1975] (iv) L214M
[1976] (v) G215S
[1977] (vi) F216M
[1978] (vii) G218D or G218N
[1979] (viii) K219G
[1980] (ix) A238M
[1981] (x) T252Y
[1982] (xi) T311W
[1983] (xii) V326C
[1984] (xiii) G357C
[1985] (xiv) S369C, S369I, S369K or S369M
[1986] (xv) I487M, I487Q or I487V
[1987] (xvi) K492N
[1988] (xvii) V499T
[1989] (xviii) G508S
[1990] (xix) R543C
[1991] (xx) L557Y
[1992] (xxi) G634A
[1993] (xxii) S635N
[1994] (xxiii) A690C and
[1995] (xxiv) Q921H.

[1996] Such polypeptides may be referred to herein as ‘variant rhamnosidases’.

[1997] Variant rhamnosidases will contain one, two, three, four, five, six, seven, eight, nine, ten, eleven, twelve, thirteen, fourteen, fifteen, sixteen, seventeen, eighteen, nineteen, twenty, twenty-one, twenty-two, twenty-three or all twenty-four mutations.

[1998] A variant rhamnosidase may contain A56C.

[1999] A variant rhamnosidase may contain A143P.

[2000] A variant rhamnosidase may contain Q181H, Q181R or Q181S. In some embodiments a variant rhamnosidase contains Q181H. In some embodiments a variant rhamnosidase contains Q181R. In some embodiments a variant rhamnosidase contains Q181S.

[2001] A variant rhamnosidase may contain L214M.

[2002] A variant rhamnosidase may contain G215S.

[2003] A variant rhamnosidase may contain F216M.

[2004] A variant rhamnosidase may contain G218D or G218N. In some embodiments a variant rhamnosidase contains G218D. In some embodiments a variant rhamnosidase contains G218N.

[2005] A variant rhamnosidase may contain K219G.

[2006] A variant rhamnosidase may contain A238M.

[2007] A variant rhamnosidase may contain T252Y.

[2008] A variant rhamnosidase may contain T311W.

[2009] A variant rhamnosidase may contain V326C.

[2010] A variant rhamnosidase may contain G357C.

[2011] A variant rhamnosidase may contain S369C, S369I, S369K or S369M. In some embodiments a variant rhamnosidase contains S369C. In some embodiments a variant rhamnosidase contains S369I. In some embodiments a variant rhamnosidase contains S369K. In some embodiments a variant rhamnosidase contains S369M.

[2012] A variant rhamnosidase may contain I487M, I487Q or I487V. In some embodiments a variant rhamnosidase contains I487M. In some embodiments a variant rhamnosidase contains I487Q. In some embodiments a variant rhamnosidase contains I487V.

[2013] A variant rhamnosidase may contain K492N.

[2014] A variant rhamnosidase may contain V499T.

[2015] A variant rhamnosidase may contain G508S.

[2016] A variant rhamnosidase may contain R543C.

[2017] A variant rhamnosidase may contain L557Y.

[2018] A variant rhamnosidase may contain G634A.

[2019] A variant rhamnosidase may contain S635N.

[2020] A variant rhamnosidase may contain A690C.

[2021] A variant rhamnosidase may contain Q921H.

[2022] Variant rhamnosidases may comprise A143P, L214M, K219G and Q921H.

[2023] Variant rhamnosidases may comprise A143P, L214M, K219G, G357C and Q921H.

[2024] Variant rhamnosidases may comprise A143P, L214M, G215S, G218N, K219G, G357C, G508S, G634A and Q921H.

[2025] Variant rhamnosidases may comprise A143P, L214M, G215S, G218D, K219G, G357C, G508S, G634A, A690C and Q921H.

[2026] Variant rhamnosidases may comprise A143P, L214M, G215S, K219G, G357C, G508S, G634A and Q921H and one to sixteen mutations selected from the list consisting of:
[2027] (i) A56C
[2028] (iii) Q181H, Q181R or Q181S
[2029] (vi) F216M
[2030] (vii) G218D or G218N
[2031] (ix) A238M
[2032] (x) T252Y
[2033] (xi) T311W
[2034] (xii) V326C
[2035] (xiv) S369C, S369I, S369K or S369M
[2036] (xv) I487M, I487Q or I487V
[2037] (xvi) K492N
[2038] (xvii) V499T
[2039] (xix) R543C
[2040] (xx) L557Y
[2041] (xxii) S635N and
[2042] (xxiii) A690C.

[2043] Variant rhamnosidases may comprise A143P, L214M, G215S, K219G, G357C, G508S, G634A, Q921H, G218D or G218N, and one to fifteen mutations selected from the list consisting of:
[2044] (i) A56C
[2045] (iii) Q181H, Q181R or Q181S
[2046] (vi) F216M
[2047] (ix) A238M
[2048] (x) T252Y
[2049] (xi) T311W
[2050] (xii) V326C
[2051] (xiv) S369C, S369I, S369K or S369M
[2052] (xv) I487M, I487Q or I487V
[2053] (xvi) K492N
[2054] (xvii) V499T
[2055] (xix) R543C
[2056] (xx) L557Y
[2057] (xxii) S635N and
[2058] (xxiii) A690C.

[2059] A variant rhamnosidase may comprise a “tag,” a sequence of amino acids that allows for the isolation and/or identification of the polypeptide. For example, adding an affinity tag can be useful in purification. Exemplary affinity tags that can be used include histidine (HIS) tags (e.g., hexa histidine-tag, or 6×His-Tag), FLAG-TAG, and HA tags. Tags may be located N-terminally or C-terminally and may be directly connected or attached via a linking sequence. SEQ ID No. 1177 provides a sequence for an exemplary 6×His-Tag with linker sequence which may be N-terminally attached. SEQ ID No. 1178 provides a sequence for an exemplary 6×His-Tag with linker sequence which may be C-terminally attached.

[2060] In certain embodiments, the tags used herein are removable, e.g., removal by chemical agents or by enzymatic means, once they are no longer needed, e.g., after the polypeptide has been purified.

[2061] A variant rhamnosidase may comprise 1100 residues or fewer, especially 1050 residues or fewer, in particular 1000 residues or fewer, such as 950 residues or fewer.

[2062] A variant rhamnosidase may consist of an amino acid sequence of SEQ ID No. 1017 with one to twenty-four mutations selected from the list consisting of:
[2063] (i) A56C
[2064] (ii) A143P
[2065] (iii) Q181H, Q181R or Q181S
[2066] (iv) L214M
[2067] (v) G215S
[2068] (vi) F216M
[2069] (vii) G218D or G218N
[2070] (viii) K219G
[2071] (ix) A238M
[2072] (x) T252Y
[2073] (xi) T311W
[2074] (xii) V326C
[2075] (xiii) G357C
[2076] (xiv) S369C, S369I, S369K or S369M
[2077] (xv) I487M, I487Q or I487V
[2078] (xvi) K492N
[2079] (xvii) V499T
[2080] (xviii) G508S
[2081] (xix) R543C
[2082] (xx) L557Y
[2083] (xxi) G634A
[2084] (xxii) S635N
[2085] (xxiii) A690C and
[2086] (xxiv) Q921H.

[2087] Variant rhamnosidases desirably demonstrate a FIOP relative to SEQ ID No. 1017 of at least 1.05, especially at least 2, in particular at least 10, such as at least 50. FIOP may be determined by the methods described in Example 4.

[2088] Function, in respect of functional variants, requires that the glycosidase activity is not notably reduced as a result of sequence variation, typically at least 50% of glycosidase activity, especially at least 75% activity, particularly at least 90%, such as at least 100% activity is maintained for at least one saponin modification reaction under at least one set of conditions (activity being determined by rate of modification of starting saponin to product saponin). Variants may be created with the intention of improving the glycosidase in some manner (e.g. conversion rate; specificity, which may be increased or reduced depending on needs; tolerance to environmental conditions, such as pH, substrate concentration, product concentration, other contaminants and the like; stability, thermal or chemical; production, such as facilitating expression or purification of the glycosidase either pre- or post-saponin modification). Variants need not be improved in all respects and may simply demonstrate a different balance of characteristics relative to the reference sequence.

[2089] Glycosidases will typically be 2000 amino acids or fewer, such as 1500 amino acids or fewer.

[2090] Suitably, glycosidases are soluble.

[2091] Glycosidases may be immobilised, such as by attachment to solid (e.g. polymer) particles. Immobilisation of glycosidases may facilitate separation from a reaction mixture, improve thermal stability and/or tolerance to environmental conditions.

[2092] Glycosidases may comprise a “tag,” a sequence of amino acids that allows for the isolation and/or identification of the polypeptide. For example, adding an affinity tag can be useful in purification. Exemplary affinity tags that can be used include histidine (HIS) tags (e.g., hexa histidine-tag, or 6×His-Tag), FLAG-TAG, and HA tags. Tags may be located N-terminally or C-terminally and may be directly connected or attached via a linking sequence. SEQ ID No. 1177 provides a sequence for an exemplary 6×His-Tag with linker sequence which may be N-terminally attached. SEQ ID No. 1178 provides a sequence for an exemplary 6×His-Tag with linker sequence which may be C-terminally attached.

### Reaction Conditions

[2093] Any suitable reaction conditions may be used. Optimal conditions will depend on a range of factors including the identity of the starting saponin, product saponin, enzyme utilised and the like.

[2094] The reaction requires treatment of a starting saponin(s) with a glycosidase(s). Appropriate glycosidases may be added to a saponin containing composition in a range of forms such as solution (typically aqueous), suspension (typically aqueous) or solid. Glycosidases may be in a purified, partially purified (such as clarified cell lysate) or unpurified form (crude cell lysate or unlysed cells). The use of partially purified or unpurified forms may be of interest when source cells (e.g. recombinant host cells, such as E. coli) express the enzyme to an extent that desired activity sufficiently exceeds any deleterious impact arising from other host cell contaminants. Desirably the glycosidase(s) are added in the form of clarified lysates. Glycosidases may be freshly prepared (e.g. clarified lysate) or taken from storage, such as thawed frozen liquid (e.g. clarified lysate) or reconstituted dried material (e.g. freeze-dried clarified lysate). Where a plurality of glycosidases is used in parallel, these will typically be expressed in different host cells to ensure adequate process control. A plurality of glycosidases used in parallel may be added together or separately (in the same or different forms).

[2095] Glycosidases may be produced using a protein secretion system, such as Bacillus licheniformis.

[2096] The weight of a glycosidase present may be in the range of 0.0001 mg to 25 mg per ml, especially 0.0001 mg to 5 mg per ml, in particular 0.0001 mg to 1 mg per ml, such as 0.001 mg to 0.5 mg per ml. When provided in the form of dried clarified lysate, the weight of a glycosidase present may be in the range of 0.01 mg to 100 mg of lysate per ml, especially 0.01 mg to 30 mg per ml, in particular 0.01 mg to 5 mg per ml, such as 0.01 mg to 1 mg per ml.

[2097] Any appropriate pH may be used, though typically between pH 4 to 9, especially pH 5 to 8, and in particular pH 5.5 to 7.5 such as pH 5.5 to 6.5. Where a plurality of glycosidases is used in series, each enzymatic modification may be undertaken at a different pH though for convenience they may be undertaken at the same pH.

[2098] Buffers may be used to aid control of the pH. Suitable buffers and appropriate concentrations may be obtained from standard sources. Inorganic salt buffers are typically used, such as potassium phosphate, sodium phosphate, potassium acetate, sodium acetate, potassium citrate, sodium citrate and the like. A suitable buffer concentration may be 10 mM to 500 mM, especially 25 mM to 250 mM and in particular 50 mM to 100 mM. Buffer concentrations of about 50 mM, such as 50 mM or about 100 mM, such as 100 mM, may be used.

[2099] Any appropriate temperature may be used, though typically between 10 degC to 60 degC, especially 15 degC to 50 degC, in particular 15 degC to 45 degC, such as 20 degC to 42 degC.

[2100] An appropriate time such that the reaction proceeds sufficiently is usually up to 10 days, especially up to 5 days, in particular up to 3 days. Desirably the enzyme and reaction conditions are chosen such that the reaction proceeds sufficiently in a period of up to 2 days, especially up to 1 day, in particular up to 18 hrs, such as 12 hrs, for example up to 6 hrs.

[2101] The reaction will be undertaken in a suitable solvent, typically water or an aqueous solution with water miscible co-solvent(s) such as methanol, ethanol, n-propanol, i-propanol, tetrahydrofuran, ethylene glycol, glycerol,1,3-propanediol or acetonitrile. Any co-solvent(s) should be present in amounts which are not excessively deleterious to the reaction proceeding, such as 50% or less v/v, especially 20% or less, in particular 10% or less, such as 5% or less, for example 2% or less (in total).

[2102] The reaction may be homogeneous or heterogeneous, monophasic, bi-phasic or multiphasic with particulates, dispersed solids in suspension and/or colloidal micelles present. Desirably the reaction will be monophasic.

[2103] The starting saponins may be present at a concentration of 0.001 to 100 g per litre, especially 0.005 to 75 g per litre, in particular 0.01 to 50 g per litre, such as 0.1 to 25 g per litre, for example 1 to 10 g per litre.

[2104] The reaction may be carried out in various modes of operation such as batch mode, fed batch mode or continuous mode.

[2105] The reaction is typically performed at a scale which can provide commercial quantities of product saponin. A batch reaction volume may be at least 10 ml, especially at least 100 ml, in particular at least 1 L. A batch reaction volume may be 500 ml to 2000 L, especially 1 L to 1000 L, in particular 10 L to 500 L, such as 25 L to 200 L.

### Completion and Mass Balance

[2106] Enzymes are desirably adequately selective for the conversion of a starting saponin into a product saponin rather than other conversions of the starting saponin. As used herein, the term selectivity means at least 25% (mole basis) of converted starting saponin results in the intended product saponin, in particular at least 50%, especially at least 75%, such as at least 90% (e.g. at least 95%).

[2107] The concept of selectivity may also be applied in the context of the conversion of a plurality of starting saponins into a plurality of product saponins such that at least 25% of converted starting saponins (mole basis) result in the intended product saponins, in particular at least 50%, especially at least 75%, such as at least 90% (e.g. at least 95%).

[2108] Desirably conversion of a starting saponin into a product saponin is complete. However, rate of conversion, specificity of conversion (including rate of non-specific conversion(s)), product inhibition, starting saponin stability under reaction conditions, product saponin stability under reaction conditions and the like mean that conversions may not be complete or that it is desirable (e.g. for maximum yield or to obtain a balance between yield and process time) for a conversion to be stopped prior to completion.

### Removal of Enzymes

[2109] At the point the reaction has progressed to the desired extent it may be stopped by denaturing or otherwise removing the enzyme. For example, the pH of reaction mixture may be adjusted to about pH to 3.5 to 4, especially pH 3.5 to 4, in particular pH 3.8 and/or the addition of sufficient quantities of anti-solvents or denaturing solvents such as acetonitrile. Precipitated enzyme may be removed by filtration.

### Other Definitions

[2110] By the term ‘Preceding peak’ is meant the peak immediately preceding the QS-21 main peak in the HPLC-UV methods described herein (see FIG. 2).

[2111] By the term ‘m/z’ is meant the mass to charge ratio of the monoisotope peak. Unless otherwise specified, ‘m/z’ is determined by negative ion electrospray mass spectrometry.

[2112] By the term ‘ion abundance’ is meant the amount of a specified m/z measured in the sample, or in a given peak as required by the context. The mass chromatogram for the specified m/z may be extracted from the MS total ion chromatogram in the UPLC-UV/MS methods described herein. The mass chromatogram plots the signal intensity versus time. Ion abundance is measured as the area of the integrated peak. The area for a specified m/z/area for a relative reference m/z=relative abundance.

[2113] By the term ‘UV absorbance at 214 nm’ is meant the area of an integrated peak in the UV absorbance chromatogram. The (area for a specified peak)/(area of all integrated peaks in the chromatogram)×100=percentage area for the specified peak.

[2114] By the term ‘UV absorbance at 214 nm and relative ion abundance’ is meant an estimate for the percentage of a given m/z for co-eluting species. (Percentage area for given UV peak)×(relative ion abundance for m/z of interest in given peak)/(sum of all relative ion abundance for given peak)=percentage of m/z of interest in the given UV peak, assumes relative ion abundance included for all coeluting species.

[2115] By the term ‘wherein the monoisotope of the most abundant species is 1988 m/z’ is meant the monoisotope of the most abundant species, first peak in the isotopic group with highest response per m/z is m/z 1987.9. The most abundant species may be determined by creating a combined spectrum across the entire total ion chromatogram using the UPLC-UV/MS method (negative ion electrospray) as described herein.

[2116] By the term ‘dried’ is meant that substantially all solvent has been removed. A dried extract will typically contain less than 5% solvent w/w, especially less than 2.5% (such as less than 5% water w/w, especially less than 2.5%). Suitably the dried extract will contain 100 ppm or less acetonitrile (w/w).

[2117] Further, there is provided a method for the manufacture of a saponin composition comprising the steps of:
[2118] (i) treating a crude aqueous extract of Quillaja saponaria by polyvinylpolypyrrolidone (PVPP) adsorption;
[2119] (ii) enzymatically modifying the treated extract with a glucosidase and/or a rhamnosidase;
[2120] (iii) purifying the modified extract by reverse phase chromatography using a polystyrene resin; and
[2121] (iv) purifying the modified extract by reverse phase chromatography using a phenyl resin to provide a saponin composition.

[2122] There is also provided a method for the manufacture of a saponin composition comprising the steps of:
[2123] (i) treating a crude aqueous extract of Quillaja saponaria by polyvinylpolypyrrolidone adsorption;
[2124] (ii) enzymatically modifying the treated extract with an engineered glucosidase polypeptide;
[2125] (iii) purifying the modified extract by reverse phase chromatography using a polystyrene resin; and
[2126] (iv) purifying the modified extract by reverse phase chromatography using a phenyl resin to provide a saponin composition.

[2127] Additionally provided a method for the manufacture of a saponin composition comprising the steps of:
[2128] (i) treating a crude aqueous extract of Quillaja saponaria by polyvinylpolypyrrolidone adsorption;
[2129] (ii) enzymatically modifying the treated extract with an engineered rhamnosidase polypeptide;
[2130] (iii) purifying the modified extract by reverse phase chromatography using a polystyrene resin; and
[2131] (iv) purifying the modified extract by reverse phase chromatography using a phenyl resin to provide a saponin composition.

[2132] Also provided is a method for the manufacture of a saponin composition comprising the steps of:
[2133] (i) treating a crude aqueous extract of Quillaja saponaria by polyvinylpolypyrrolidone adsorption;
[2134] (ii) enzymatically modifying the treated extract with an engineered glucosidase and an engineered rhamnosidase;
[2135] (iii) purifying the modified extract by reverse phase chromatography using a polystyrene resin; and
[2136] (iv) purifying the modified extract by reverse phase chromatography using a phenyl resin to provide a saponin composition.

[2137] Typically, the crude aqueous extract is a bark extract. Suitably the QS-21 main peak content in an aqueous solution of crude aqueous extract of Quillaja saponaria is at least 1 g/L, such as at least 2 g/L, especially at least 2.5 g/L and in particular at least 2.8 g/L (e.g. as determined by UV absorbance relative to a control sample of known concentration).

[2138] The step of purifying the extract by polyvinylpolypyrrolidone adsorption involves treatment of the extract with polyvinylpolypyrrolidone adsorbant e.g. resin. Typically, the extract is agitated with the polyvinylpolypyrrolidone resin. The extract may subsequently be separated from the polyvinylpolypyrrolidone resin with adsorbed impurities by filtration. This step of the process generally removes polyphenolic impurities such as tannins.

[2139] The step of purifying the extract by reverse phase chromatography using a polystyrene resin typically uses acetonitrile and water as solvent, usually acidified with a suitable acid such as acetic acid. An example of a suitable resin is Amberchrom XT20. Chromatography may be undertaken using isocratic conditions, though is typically operated under a solvent gradient (continuous, such as linear, or stepped), such as those provided in the Examples. This step of the process generally removes non-saponin material and enriches the desired saponins. Each polystyrene chromatography run is typically at a scale of between 25-200 g of QS-21, such as between 50-150 g and in particular between 70-110 g (amounts being based on QS-21 main peak content in the material by UV).

[2140] Purifying the extract by reverse phase chromatography using a phenyl resin typically uses acetonitrile and water as solvent, usually acidified with a suitable acid such as acetic acid. Chromatography may be undertaken using a solvent gradient (continuous, such as linear, or stepped), though is typically operated under isocratic conditions. This step of the process provides the final purification of the desired saponins. Selected fractions may be pooled to maximise yield of material matching the required criteria. Each phenyl chromatography run is typically at a scale of between 4-40 g of QS-21, such as between 10-30 g and in particular between 13-21 g (amounts being based on QS-21 main peak content in the material by UV).

[2141] The method may comprise the further step of removing solvent to provide a dried saponin extract. Consequently, the invention provides a method for the manufacture of a saponin composition comprising the steps of:
[2142] (i) treating a crude aqueous extract of Quillaja saponaria by polyvinylpolypyrrolidone adsorption;
[2143] (ii) enzymatically modifying the treated extract with a glucosidase and/or a rhamnosidase;
[2144] (iii) purifying the modified extract by reverse phase chromatography using a polystyrene resin; and
[2145] (iv) purifying the modified extract by reverse phase chromatography using a phenyl resin; and
[2146] (v) removing solvent to provide a dried saponin composition.

[2147] The invention also provides a method for the manufacture of a saponin composition comprising the steps of:
[2148] (i) treating a crude aqueous extract of Quillaja saponaria by polyvinylpolypyrrolidone adsorption;
[2149] (ii) enzymatically modifying the treated extract with an engineered glucosidase polypeptide;
[2150] (iii) purifying the modified extract by reverse phase chromatography using a polystyrene resin; and
[2151] (iv) purifying the modified extract by reverse phase chromatography using a phenyl resin; and
[2152] (v) removing solvent to provide a dried saponin composition.

[2153] Further provided is a method for the manufacture of a saponin composition comprising the steps of:
[2154] (i) treating a crude aqueous extract of Quillaja saponaria by polyvinylpolypyrrolidone adsorption;
[2155] (ii) enzymatically modifying the treated extract with an engineered rhamnosidase polypeptide;
[2156] (iii) purifying the modified extract by reverse phase chromatography using a polystyrene resin; and
[2157] (iv) purifying the modified extract by reverse phase chromatography using a phenyl resin; and
[2158] (v) removing solvent to provide a dried saponin composition.

[2159] Additionally provided is a method for the manufacture of a saponin composition comprising the steps of:
[2160] (i) treating a crude aqueous extract of Quillaja saponaria by polyvinylpolypyrrolidone adsorption;
[2161] (ii) enzymatically modifying the treated extract with an engineered glucosidase polypeptide and an engineered rhamnosidase polypeptide;
[2162] (iii) purifying the modified extract by reverse phase chromatography using a polystyrene resin; and
[2163] (iv) purifying the modified extract by reverse phase chromatography using a phenyl resin; and
[2164] (v) removing solvent to provide a dried saponin composition.

[2165] In order to improve drying efficiency, it may be desirable to undertake further steps of concentrating the extract, such as by capture and release using an appropriate technique, for example reverse phase chromatography (e.g. using a C8 resin), and/or exchanging the solvent in advance of the drying step.

[2166] Also provided is a method for the manufacture of a saponin composition comprising the steps:
[2167] (i) treating a crude aqueous extract of Quillaja saponaria by polyvinylpolypyrrolidone adsorption;
[2168] (ii) enzymatically modifying the treated extract with a glucosidase and/or a rhamnosidase;
[2169] (iii) purifying the modified extract by reverse phase chromatography using a polystyrene resin; and
[2170] (iv) purifying the modified extract by reverse phase chromatography using a phenyl resin;
[2171] (v) optionally concentrating the modified extract;
[2172] (vi) optionally exchanging the solvent; and
[2173] (vii) removing the remaining solvent to provide a dried saponin composition;
   wherein steps (v) and (vi) may be optionally be in reverse order or undertaken concurrently, though are typically in the order shown.

[2174] Further provided is a method for the manufacture of a saponin composition comprising the steps:
[2175] (i) treating a crude aqueous extract of Quillaja saponaria by polyvinylpolypyrrolidone adsorption;
[2176] (ii) enzymatically modifying the treated extract with an engineered glucosidase polypeptide;
[2177] (iii) purifying the modified extract by reverse phase chromatography using a polystyrene resin; and
[2178] (iv) purifying the modified extract by reverse phase chromatography using a phenyl resin;
[2179] (v) optionally concentrating the modified extract;
[2180] (vi) optionally exchanging the solvent; and
[2181] (vii) removing the remaining solvent to provide a dried saponin composition;
   wherein steps (v) and (vi) may be optionally be in reverse order or undertaken concurrently, though are typically in the order shown.

[2182] Additionally provided is a method for the manufacture of a saponin composition comprising the steps:
[2183] (i) treating a crude aqueous extract of Quillaja saponaria by polyvinylpolypyrrolidone adsorption;
[2184] (ii) enzymatically modifying the treated extract with an engineered rhamnosidase polypeptide;
[2185] (iii) purifying the modified extract by reverse phase chromatography using a polystyrene resin; and
[2186] (iv) purifying the modified extract by reverse phase chromatography using a phenyl resin;
[2187] (v) optionally concentrating the modified extract;
[2188] (vi) optionally exchanging the solvent; and
[2189] (vii) removing the remaining solvent to provide a dried saponin composition;
   wherein steps (v) and (vi) may be optionally be in reverse order or undertaken concurrently, though are typically in the order shown.

[2190] The invention provides a method for the manufacture of a saponin composition comprising the steps:
[2191] (i) treating a crude aqueous extract of Quillaja saponaria by polyvinylpolypyrrolidone adsorption;
[2192] (ii) enzymatically modifying the treated extract with an engineered glucosidase polypeptide and an engineered rhamnosidase polypeptide;
[2193] (iii) purifying the modified extract by reverse phase chromatography using a polystyrene resin; and
[2194] (iv) purifying the modified extract by reverse phase chromatography using a phenyl resin;
[2195] (v) optionally concentrating the modified extract;
[2196] (vi) optionally exchanging the solvent; and
[2197] (vii) removing the remaining solvent to provide a dried saponin composition;
   wherein steps (v) and (vi) may be optionally be in reverse order or undertaken concurrently, though are typically in the order shown.

[2198] Also provided is a method for the manufacture of a saponin composition comprising the steps:
[2199] (i) treating a crude aqueous extract of Quillaja saponaria by polyvinylpolypyrrolidone adsorption;
[2200] (ii) enzymatically modifying the treated extract with a glucosidase and/or a rhamnosidase;
[2201] (iii) purifying the modified extract by diafiltration, ultrafiltration or dialysis;
[2202] (iv) purifying the modified extract by reverse phase chromatography using a polystyrene resin;
[2203] (v) purifying the modified extract by reverse phase chromatography using a phenyl resin;
[2204] (vi) concentrating the modified extract by reverse phase chromatography using a C8 resin;
[2205] (vii) exchanging the solvent; and
[2206] (viii) removing the remaining solvent to provide a dried saponin composition.

[2207] Further provided is a method for the manufacture of a saponin composition comprising the steps:
[2208] (i) treating a crude aqueous extract of Quillaja saponaria by polyvinylpolypyrrolidone adsorption;
[2209] (ii) enzymatically modifying the treated extract with an engineered glucosidase polypeptide;
[2210] (iii) purifying the modified extract by diafiltration, ultrafiltration or dialysis;
[2211] (iv) purifying the modified extract by reverse phase chromatography using a polystyrene resin;
[2212] (v) purifying the modified extract by reverse phase chromatography using a phenyl resin;
[2213] (vi) concentrating the modified extract by reverse phase chromatography using a C8 resin;
[2214] (vii) exchanging the solvent; and
[2215] (viii) removing the remaining solvent to provide a dried saponin composition.

[2216] Additionally provided is a method for the manufacture of a saponin composition comprising the steps:
[2217] (i) treating a crude aqueous extract of Quillaja saponaria by polyvinylpolypyrrolidone adsorption;
[2218] (ii) enzymatically modifying the treated extract with an engineered rhamnosidase polypeptide;
[2219] (iii) purifying the modified extract by diafiltration, ultrafiltration or dialysis;
[2220] (iv) purifying the modified extract by reverse phase chromatography using a polystyrene resin;
[2221] (v) purifying the modified extract by reverse phase chromatography using a phenyl resin;
[2222] (vi) concentrating the modified extract by reverse phase chromatography using a C8 resin;
[2223] (vii) exchanging the solvent; and
[2224] (viii) removing the remaining solvent to provide a dried saponin composition.

[2225] The invention provides a method for the manufacture of a saponin composition comprising the steps:
[2226] (i) treating a crude aqueous extract of Quillaja saponaria by polyvinylpolypyrrolidone adsorption;
[2227] (ii) enzymatically modifying the treated extract with an engineered glucosidase polypeptide and an engineered rhamnosidase polypeptide;
[2228] (iii) purifying the modified extract by diafiltration, ultrafiltration or dialysis;
[2229] (iv) purifying the modified extract by reverse phase chromatography using a polystyrene resin;
[2230] (v) purifying the modified extract by reverse phase chromatography using a phenyl resin;
[2231] (vi) concentrating the modified extract by reverse phase chromatography using a C8 resin;
[2232] (vii) exchanging the solvent; and
[2233] (viii) removing the remaining solvent to provide a dried saponin composition.

[2234] The step of purifying the extract by diafiltration, ultrafiltration or dialysis, is suitably purification by diafiltration. typically using tangential flow. An appropriate example of a membrane is a 30 kDa cut-off. This step of the process generally removes salts, sugars and other low molecular weight materials.

[2235] Concentration of the extract may be performed using any suitable technique. For example, concentration may be performed using a capture and release methodology, such as reverse phase chromatography, in particular using a C8 resin. The reverse phase chromatography typically uses acetonitrile and water as solvent, usually acidified with a suitable acid such as acetic acid. Chromatography is typically operated under a solvent gradient, with the saponin extract captured in low organic solvent and eluted in high organic solvent, in particular, a stepped solvent gradient.

[2236] Exchanging the solvent may be performed using any suitable technique, in particular diafiltration, ultrafiltration or dialysis, especially diafiltration. Solvent exchange may be useful, for example, in reducing the acetonitrile content such as described in WO2014016374. A suitable membrane may be selected to allow solvent exchange while retaining the saponin extract, such as a 1 kDa membrane.

[2237] Drying, by removing the solvent, may be undertaken by any suitable means, in particular by lyophilisation. During drying, degradation of the saponin extract can occur, leading to the formation of Iyo impurity. Consequently, it is desirable to dry under conditions which limit formation of Iyo impurity, such as by limiting the drying temperature and/or drying time. Suitably removal of solvent is undertaken by a single lyophilisation process. The extent of drying required will depend on the nature of the solvent, for example non-pharmaceutically acceptable solvents will desirably be removed to a high degree, whereas some pharmaceutically acceptable solvents (such as water) may be removed to a lesser degree.

[2238] Suitably the methods of the present invention are undertaken at a scale of between 25-1000 g of QS-21, such as between 50-500 g and in particular between 100-500 g (amounts being based on QS-21 main peak content in the material by UV).

[2239] Provided is a product saponin prepared according to the present invention. There is provided the use of a product saponin prepared according to the present invention in the manufacture of a medicament. Additionally, provided is a product saponin prepared according to the present invention for use as a medicament, in particular as an adjuvant. Also provided is an adjuvant composition comprising a product saponin prepared according to the present invention.

[2240] There is provided a crude extract (such as from Quillaja species, especially Quillaja saponaria), such as water and/or lower alcohol extract, especially aqueous extract which has been treated by a glucosidase. There is also provided a crude extract (such as from Quillaja species, especially Quillaja saponaria), such as water and/or lower alcohol extract, especially aqueous extract which has been treated by a rhamnosidase. Also provided is a crude extract (such as from Quillaja species, especially Quillaja saponaria), such as water and/or lower alcohol extract, especially aqueous extract which has been treated by a glucosidase and a rhamnosidase.

[2241] There is provided a crude bark extract (such as from Quillaja species, especially Quillaja saponaria), such as water and/or lower alcohol extract, especially aqueous extract which has been treated by a glucosidase. There is also provided a crude bark extract (such as from Quillaja species, especially Quillaja saponaria), such as water and/or lower alcohol extract, especially aqueous extract which has been treated by a rhamnosidase. Also provided is a crude saponin extract (such as from Quillaja species, especially Quillaja saponaria), such as water and/or lower alcohol extract, especially aqueous extract which has been treated by a glucosidase and a rhamnosidase.

[2242] There is provided a PVPP treated extract (such as from Quillaja species, especially Quillaja saponaria), such as water and/or lower alcohol extract, especially aqueous extract which has been treated by a glucosidase. There is also provided a PVPP treated extract (such as from Quillaja species, especially Quillaja saponaria), such as water and/or lower alcohol extract, especially aqueous extract which has been treated by a rhamnosidase. Also provided is a PVPP treated extract (such as from Quillaja species, especially Quillaja saponaria), such as water and/or lower alcohol extract, especially aqueous extract which has been treated by a glucosidase and a rhamnosidase.

[2243] There is provided a PVPP treated bark extract (such as from Quillaja species, especially Quillaja saponaria), such as water and/or lower alcohol extract, especially aqueous extract which has been treated by a glucosidase. There is also provided a PVPP treated bark extract (such as from Quillaja species, especially Quillaja saponaria), such as water and/or lower alcohol extract, especially aqueous extract which has been treated by a rhamnosidase. Also provided is a PVPP treated saponin extract (such as from Quillaja species, especially Quillaja saponaria), such as water and/or lower alcohol extract, especially aqueous extract which has been treated by a glucosidase and a rhamnosidase.

[2244] Also provided is a saponin composition containing at least 93% QS-21 main peak and <0.25% 2018 component by UV absorbance at 214 nm. Suitably wherein the monoisotope of the most abundant species is 1987.9 m/z. Desirably, the saponin composition contains at least 98% QS-21 group by UV absorbance at 214 nm. Desirably, the extract contains 1% or less of Iyo impurity by UV absorbance at 214 nm. Desirably, the extract contains 1% or less of largest peak outside the QS-21 group by UV absorbance at 214 nm.

[2245] Also provided is a saponin composition containing at least 98% QS-21 group, at least 93% QS-21 main peak, <0.25% 2018 component, 1% or less of largest peak outside the QS-21 group by UV absorbance at 214 nm and wherein the monoisotope of the most abundant species is 1987.9 m/z. Suitably the saponin composition contains <0.23% 2018 component, especially <0.21% 2018 component, in particular <0.21% 2018 component, such as 0.2% or less 2018 component.

[2246] The saponin compositions desirably comprise at least 40%, such as at least 50%, suitably at least 60%, especially at least 70% and desirably at least 80%, for example at least 90% (as determined by UV absorbance at 214 nm and by relative ion abundance) QS-21 1988 A component, QS-21 1856 A component and/or QS-21 2002 A component. In certain embodiments, the saponin composition comprises at least 40%, such as at least 50%, in particular at least 60%, especially at least 65%, such as at least 70%, QS-21 1988 A component as determined by UV absorbance at 214 nm and by relative ion abundance. In certain embodiments the saponin composition contain 90% or less, such as 85% or less, or 80% or less, QS-21 1988 A component as determined by UV absorbance at 214 nm and by relative ion abundance. In certain embodiments, the saponin composition contain from 40% to 90% QS-21 1988 A component, such as 50% to 85% QS-21 1988 A component, especially 70% to 80% QS-21 1988 A component as determined by UV absorbance at 214 nm and by relative ion abundance. In certain embodiments, the saponin compositions contain 30% or less, such as 25% or less, QS-21 1856 A as determined by UV absorbance at 214 nm and by relative ion abundance. In certain embodiments the saponin composition contain at least 5%, such as at least 10% QS-21 1856 A by UV absorbance at 214 nm and by relative ion abundance. In certain embodiments, the saponin compositions contain from 5% to 30% QS-21 1856 A, such as 10% to 25% QS-21 1856 A as determined by UV absorbance at 214 nm and by relative ion abundance. In certain embodiments, the saponin composition contains 40% or less, such as 30% or less, in particular 20% or less, especially 10% or less QS-21 2002 A component by UV absorbance at 214 nm and by relative ion abundance. In certain embodiments, the saponin composition contain at least 0.5%, such as at least 1%, QS-21 2002 A component by UV absorbance at 214 nm and by relative ion abundance. In certain embodiments, the saponin composition contain from 0.5% to 40% QS-21 2002 A component, such as 1% to 10% QS-21 2002 A component as determined by UV absorbance at 214 nm and by relative ion abundance.

[2247] By the term ‘Iyo impurity’ is meant the triterpenoid glycosides identified as ‘Lyophilization Peak’ in FIG. 6. Suitably the Iyo impurity in the UPLC-UV/MS methods described herein has a retention time of approximately 4.7 min and the primary component of the peak having a monoisotopic molecular weight of 1855.9. The terms 2018 component, QS-21 main peak, QS-21 group may be understood such as by reference to the examples herein.

[2248] The saponin compositions of the present invention (i.e. a composition comprising a product saponin prepared according to the present invention) may be combined with further adjuvants, such as a TLR4 agonist, in particular lipopolysaccharide TLR4 agonists, such as lipid A derivatives, especially a monophosphoryl lipid A e.g. 3-de-O-acylated monophosphoryl lipid A (3D-MPL). 3D-MPL is sold under the name ‘MPL’ by GlaxoSmithKline Biologicals N.A. and is referred throughout the document as 3D-MPL. See, for example, U.S. Pat. Nos. 4,436,727; 4,877,611; 4,866,034 and 4,912,094. 3D-MPL can be produced according to the methods described in GB 2 220 211 A. Chemically it is a mixture of 3-deacylated monophosphoryl lipid A with 4, 5 or 6 acylated chains.

[2249] Other TLR4 agonists which may be of use in the present invention include Glucopyranosyl Lipid Adjuvant (GLA) such as described in WO2008/153541 or WO2009/143457 or the literature articles Coler R N et al. (2011) Development and Characterization of Synthetic Glucopyranosyl Lipid Adjuvant System as a Vaccine Adjuvant. PLoS ONE 6(1): e16333. doi:10.1371/journal.pone.0016333 and Arias M A et al. (2012) Glucopyranosyl Lipid Adjuvant (GLA), a Synthetic TLR4 Agonist, Promotes Potent Systemic and Mucosal Responses to Intranasal Immunization with HIVgp140. PLoS ONE 7(7): e41144. doi:10.1371/journal.pone.0041144. WO2008/153541 or WO2009/143457 are incorporated herein by reference for the purpose of defining TLR4 agonists which may be of use in the present invention.

[2250] A particular alkyl glucosaminide phosphate (AGP) of interest is set forth as follows:

[chemical structure]

[2251] TLR4 agonists of interest include:

[chemical structure]

3-deacyl monophosphoryl hexa-acyl lipid A.

[2252] Another TLR4 agonist of interest is:

[chemical structure]

3-deacyl monophosphoryl lipid A.

[2253] A TLR4 agonist of interest is dLOS (as described in Han, 2014):

[chemical structure]

[2254] A typical adult human dose of adjuvant will comprise a saponin composition, such as a Q-21 composition, at amounts between 1 and 100 ug per human dose. The saponin extract may be used at a level of about 50 ug. Examples of suitable ranges are 40-60 ug, suitably 45-ug or 49-51 ug, such as 50 ug. In a further embodiment, the human dose comprises saponin composition, such as a Q-21 composition, at a level of about 25 ug. Examples of lower ranges include 20-30 ug, suitably 22-28 ug or 24-26 ug, such as 25 ug. Human doses intended for children may be reduced compared to those intended for an adult (e.g. reduction by 50%).

[2255] The TLR4 agonists, such as a lipopolysaccharide, such as 3D-MPL, can be used at amounts between 1 and 100 ug per human dose. 3D-MPL may be used at a level of about 50 ug. Examples of suitable ranges are 40-60 ug, suitably 45-55 ug or 49-51 ug, such as 50 ug. In a further embodiment, the human dose comprises 3D-MPL at a level of about 25 ug. Examples of lower ranges include 20-30 ug, suitably 22-28 ug or 24-26 ug, such as 25 ug. Human doses intended for children may be reduced compared to those intended for an adult (e.g. reduction by 50%).

[2256] When both a TLR4 agonist and a saponin composition, such as a Q-21 composition, are present in the adjuvant, then the weight ratio of TLR4 agonist to saponin is suitably between 1:5 to 5:1, suitably 1:1. For example, where 3D-MPL is present at an amount of 50 ug or 25 ug, then suitably QS-21 may also be present at an amount of 50 ug or 25 ug per human dose.

[2257] Adjuvants may also comprise a suitable carrier, such as an emulsion (e.g. an oil in water emulsion, such as a squalene containing oil in water emulsion) or liposomes.

[2258] The present invention provides an adjuvant composition comprising a saponin composition according to the present invention. Suitably the adjuvant composition further comprises a TLR4 agonist.

### Liposomes

[2259] The term ‘liposome’ is well known in the art and defines a general category of vesicles which comprise one or more lipid bilayers surrounding an aqueous space. Liposomes thus consist of one or more lipid and/or phospholipid bilayers and can contain other molecules, such as proteins or carbohydrates, in their structure. Because both lipid and aqueous phases are present, liposomes can encapsulate or entrap water-soluble material, lipid-soluble material, and/or amphiphilic compounds.

[2260] Liposome size may vary from 30 nm to several um depending on the phospholipid composition and the method used for their preparation.

[2261] The liposomes of use in the present invention suitably contain DOPC, or, consist essentially of DOPC and sterol (with saponin and optionally TLR4 agonist).

[2262] In the present invention, the liposome size will be in the range of 50 nm to 200 nm, especially 60 nm to 180 nm, such as 70-165 nm. Optimally, the liposomes should be stable and have a diameter of ˜100 nm to allow convenient sterilization by filtration.

[2263] Structural integrity of the liposomes may be assessed by methods such as dynamic light scattering (DLS) measuring the size (Z-average diameter, Zav) and polydispersity of the liposomes, or, by electron microscopy for analysis of the structure of the liposomes. In one embodiment the average particle size is between 95 and 120 nm, and/or, the polydispersity (Pdl) index is not more than 0.3 (such as not more than 0.2).

### Further Excipients

[2264] In a further embodiment, a buffer is added to an adjuvant composition. The pH of a liquid preparation is adjusted in view of the components of the composition and necessary suitability for administration to the subject. Suitably, the pH of a liquid mixture is at least 4, at least 5, at least 5.5, at least 5.8, at least 6. The pH of the liquid mixture may be less than 9, less than 8, less than 7.5 or less than 7. In other embodiments, pH of the liquid mixture is between 4 and 9, between 5 and 8, such as between 5.5 and 8. Consequently, the pH will suitably be between 6-9, such as 6.5-8.5. In a particularly preferred embodiment the pH is between 5.8 and 6.4. An appropriate buffer may be selected from acetate, citrate, histidine, maleate, phosphate, succinate, tartrate and TRIS. In one embodiment, the buffer is a phosphate buffer such as Na/Na₂PO₄, Na/K₂PO₄ or K/K₂PO₄.

[2265] The buffer can be present in the liquid mixture in an amount of at least 6 mM, at least 10 mM or at least 40 mM. The buffer can be present in the liquid mixture in an amount of less than 100 mM, less than 60 mM or less than 40 mM.

[2266] It is well known that for parenteral administration solutions should have a pharmaceutically acceptable osmolality to avoid cell distortion or lysis. A pharmaceutically acceptable osmolality will generally mean that solutions will have an osmolality which is approximately isotonic or mildly hypertonic. Suitably the compositions (when reconstituted, if presented in dried form) will have an osmolality in the range of 250 to 750 mOsm/kg, for example, the osmolality may be in the range of 250 to 550 mOsm/kg, such as in the range of 280 to 500 mOsm/kg. In a particularly preferred embodiment the osmolality may be in the range of 280 to 310 mOsm/kg. Osmolality may be measured according to techniques known in the art, such as by the use of a commercially available osmometer, for example the Advanced® Model 2020 available from Advanced Instruments Inc. (USA).

[2267] An “isotonicity agent” is a compound that is physiologically tolerated and imparts a suitable tonicity to a formulation to prevent the net flow of water across cell membranes that are in contact with the formulation. In some embodiments, the isotonicity agent used for the composition is a salt (or mixtures of salts), conveniently the salt is sodium chloride, suitably at a concentration of approximately 150 nM. In other embodiments, however, the composition comprises a non-ionic isotonicity agent and the concentration of sodium chloride in the composition is less than 100 mM, such as less than 80 mM, e.g. less than 50 mM, such as less mM, less than 30 mM and especially less than 20 mM. The ionic strength in the composition may be less than 100 mM, such as less than 80 mM, e.g. less than 50 mM, such as less 40 mM or less than 30 mM.

[2268] In a particular embodiment, the non-ionic isotonicity agent is a polyol, such as sucrose and/or sorbitol. The concentration of sorbitol may e.g. between about 3% and about 15% (w/v), such as between about 4% and about 10% (w/v). Adjuvants comprising an immunologically active saponin fraction and a TLR4 agonist wherein the isotonicity agent is salt or a polyol have been described in WO2012/080369.

[2269] Suitably, a human dose volume of between 0.05 ml and 1 ml, such as between 0.1 and ml, in particular a dose volume of about 0.5 ml, or 0.7 ml. The volumes of the compositions used may depend on the delivery route and location, with smaller doses being given by the intradermal route. A unit dose container may contain an overage to allow for proper manipulation of materials during administration of the unit dose.

[2270] The ratio of saponin:DOPC will typically be in the order of 1:50 to 1:10 (w/w), suitably between 1:25 to 1:15 (w/w), and preferably 1:22 to 1:18 (w/w), such as 1:20 (w/w).

[2271] Suitably the saponin is presented in a less reactogenic composition where it is quenched with an exogenous sterol, such as cholesterol. Cholesterol is disclosed in the Merck Index, 13th Edn., page 381, as a naturally occurring sterol found in animal fat. Cholesterol has the formula (C₂₇H₄₆O) and is also known as (3β)-cholest-5-en-3-ol.

[2272] The ratio of saponin:sterol will typically be in the order of 1:100 to 1:1 (w/w), suitably between 1:10 to 1:1 (w/w), and preferably 1:5 to 1:1 (w/w). Suitably excess sterol is present, the ratio of saponin:sterol being at least 1:2 (w/w). In one embodiment, the ratio of saponin:sterol is 1:5 (w/w). In one embodiment, the sterol is cholesterol.

[2273] The amount of liposome (weight of lipid and sterol) will typically be in the range of 0.1 mg to 10 mg per human dose of a composition, in particular 0.5 mg to 2 mg per human dose of a composition.

[2274] In a particularly suitable embodiment, liposomes used in the invention comprise DOPC and a sterol, in particular cholesterol. Thus, in a particular embodiment, a composition used in the invention comprises saponin extract in the form of a liposome, wherein said liposome comprises DOPC and a sterol, in particular cholesterol.

[2275] A particular adjuvant of interest features liposomes comprising DOPC and cholesterol, with TLR4 agonist and a saponin prepared according to the present invention, especially 3D-MPL and a saponin prepared according to the present invention.

[2276] Another adjuvant of interest features liposomes comprising DOTAP and DMPC, with TLR4 agonist and a saponin prepared according to the present invention, especially dLOS and a saponin prepared according to the present invention.

### Antigens

[2277] The adjuvants prepared according to the present invention may be utilised in conjunction with an immunogen or antigen. In some embodiments a polynucleotide encoding the immunogen or antigen is provided.

[2278] The adjuvant may be administered to a subject separately from an immunogen or antigen, or the adjuvant may be combined, either during manufacturing or extemporaneously, with an immunogen or antigen to provide an immunogenic composition for combined administration.

[2279] As used herein, a subject is a mammalian animal, such as a rodent, non-human primate, or human.

[2280] Consequently, there is provided a method for the preparation of an immunogenic composition comprising an immunogen or antigen, or a polynucleotide encoding the immunogen or antigen, said method comprising the steps of:
[2281] (i) preparing an adjuvant composition comprising a saponin prepared according to the present invention;
[2282] (ii) mixing the adjuvant with an immunogen or antigen, or a polynucleotide encoding the immunogen or antigen.

[2283] There is also provided the use of an adjuvant comprising a saponin prepared according to the present invention in the manufacture of a medicament. Suitably the medicament comprises an immunogen or antigen, or a polynucleotide encoding the immunogen or antigen. Further provided is an adjuvant comprising a saponin prepared according to the present invention for use as a medicament. Suitably the medicament comprises an immunogen or antigen, or a polynucleotide encoding the immunogen or antigen.

[2284] By the term immunogen is meant a polypeptide which is capable of eliciting an immune response. Suitably the immunogen is an antigen which comprises at least one B or T cell epitope. The elicited immune response may be an antigen specific B cell response, which produces neutralizing antibodies. The elicited immune response may be an antigen specific T cell response, which may be a systemic and/or a local response. The antigen specific T cell response may comprise a CD4+ T cell response, such as a response involving CD4+ T cells expressing a plurality of cytokines, e.g. IFNgamma, TNFalpha and/or IL2. Alternatively, or additionally, the antigen specific T cell response comprises a CD8+ T cell response, such as a response involving CD8+ T cells expressing a plurality of cytokines, e.g., IFNgamma, TNFalpha and/or IL2.

[2285] The antigen may be derived (such as obtained from) from a human or non-human pathogen including, e.g., bacteria, fungi, parasitic microorganisms or multicellular parasites which infect human and non-human vertebrates, or from a cancer cell or tumor cell.

[2286] In one embodiment the antigen is a recombinant protein, such as a recombinant prokaryotic protein.

[2287] A plurality of antigens may be provided. For example, a plurality of antigens may be provided to strengthen the elicited immune response (e.g. to ensure strong protection), a plurality of antigens may be provided to broaden the immune response (e.g. to ensure protection against a range of pathogen strains or in a large proportion of a subject population) or a plurality of antigens may be provided to currently elicit immune responses in respect of a number of disorders (thereby simplifying administration protocols). Where a plurality of antigens are provided, these may be as distinct proteins or may be in the form of one or more fusion proteins.

[2288] Antigen may be provided in an amount of 0.1 to 100 ug per human dose. The present invention may be applied for use in the treatment or prophylaxis of a disease or disorder associated with one or more antigens described above. In one embodiment the disease or disorder is selected from malaria, tuberculosis, COPD, HIV and herpes.

[2289] The adjuvant may be administered separately from an immunogen or antigen, or may be combined, either during manufacturing or extemporaneously), with an immunogen or antigen to provide an immunogenic composition for combined administration.

### Sterilisation

[2290] For parenteral administration in particular, compositions should be sterile. Sterilisation can be performed by various methods although is conveniently undertaken by filtration through a sterile grade filter. Sterilisation may be performed a number of times during preparation of an adjuvant or immunogenic composition, but is typically performed at least at the end of manufacture.

[2291] By “sterile grade filter” it is meant a filter that produces a sterile effluent after being challenged by microorganisms at a challenge level of greater than or equal to 1×10⁷/cm² of effective filtration area. Sterile grade filters are well known to the person skilled in the art of the invention for the purpose of the present invention, sterile grade filters have a pore size between and 0.25 um, suitably 0.18-0.22 um, such as 0.2 or 0.22 um.

[2292] The membranes of the sterile grade filter can be made from any suitable material known to the skilled person, for example, but not limited to cellulose acetate, polyethersulfone (PES), polyvinylidene fluoride (PVDF), polytetrafluoroethylene (PTFE). In a particular embodiment of the invention one or more or all of the filter membranes of the present invention comprise polyethersulfone (PES), in particular hydrophilic polyethersulfone. In a particular embodiment of the invention, the filters used in the processes described herein are a double layer filter, in particular a sterile filter with built-in prefilter having larger pore size than the pore size of the end filter. In one embodiment the sterilizing filter is a double layer filter wherein the pre-filter membrane layer has a pore size between 0.3 and 0.5 nm, such as 0.35 or 0.45 nm. According to further embodiments, filters comprise asymmetric filter membrane(s), such as asymmetric hydrophilic PES filter membrane(s). Alternatively, the sterilizing filter layer may be made of PVDF, e.g. in combination with an asymmetric hydrophilic PES pre-filter membrane layer. In light of the intended medical uses, materials should be of pharmaceutical grade (such as parenteral grade).

### Clauses of the Invention

[2293] The invention is illustrated by the following clauses:
[2294] Clause 1. A method for making a product saponin, said method comprising the step of enzymatically converting a starting saponin to the product saponin.
[2295] Clause 2. A method for increasing the amount of a product saponin in a composition, said method comprising the step of enzymatically converting a starting saponin to the product saponin.
[2296] Clause 3. A method for reducing the amount of a starting saponin in a composition, said method comprising the step of enzymatically converting the starting saponin to a product saponin.
[2297] Clause 4. The method according to any one of clauses 1 to 3, wherein the starting saponin is a naturally occurring saponin.
[2298] Clause 5. The method according to any one of clauses 1 to 3, wherein the starting saponin is an artificial saponin.
[2299] Clause 6. The method according to any one of clauses 1 to 5, wherein the starting saponin is a steroid glycoside.
[2300] Clause 7. The method according to any one of clauses 1 to 6, wherein the starting saponin is a terpenoid glycoside.
[2301] Clause 8. The method according to clause 7, wherein the starting saponin is a triterpenoid glycoside.
[2302] Clause 9. The method according to clause 8, wherein the starting saponin is a quillaic acid glycoside.
[2303] Clause 10. The method according to any one of clauses 1 to 4 or 6 to 9, wherein the starting saponin is obtainable from plants of the genera Gypsophilia, Saponaria or Quillaja.
[2304] Clause 11. The method according to clause 10, wherein the starting saponin is obtainable from Quillaja species.
[2305] Clause 12. The method according to clause 11, wherein the starting saponin is obtainable from Quillaja brasiliensis.
[2306] Clause 13. The method according to clause 12, wherein the starting saponin is obtained from Quillaja brasiliensis.
[2307] Clause 14. The method according to clause 11, wherein the starting saponin is obtainable from Quillaja saponaria.
[2308] Clause 15. The method according to clause 14, wherein the starting saponin is obtained from Quillaja saponaria.
[2309] Clause 16. The method according to either clause 14 or 15, wherein the starting saponin is a QS-18 family component.
[2310] Clause 17. The method according to clause 16, wherein the starting saponin is a QS-18 2150 A component.
[2311] Clause 18. The method according to clause 17, wherein the starting saponin is QS-18 2150 A V1.
[2312] Clause 19. The method according to clause 17, wherein the starting saponin is QS-18 2150 A V2.
[2313] Clause 20. The method according to clause 16, wherein the starting saponin is QS-18 2018 A component.
[2314] Clause 21. The method according to clause 16, wherein the starting saponin is a QS-18 2164 A component.
[2315] Clause 22. The method according to clause 21, wherein the starting saponin is QS-18 2164 A V1.
[2316] Clause 23. The method according to clause 21, wherein the starting saponin is QS-18 2164 A V2.
[2317] Clause 24. The method according to clause 16, wherein the starting saponin is a QS-18 2150 B component.
[2318] Clause 26. The method according to clause 24, wherein the starting saponin is QS-18 2150 B V1.
[2319] Clause 26. The method according to clause 24, wherein the starting saponin is QS-18 2150 B V2.
[2320] Clause 27. The method according to clause 16, wherein the starting saponin is QS-18 2018 B component.
[2321] Clause 28. The method according to clause 16, wherein the starting saponin is a QS-18 2164 B component.
[2322] Clause 29. The method according to clause 28, wherein the starting saponin is QS-18 2164 B V1.
[2323] Clause 30. The method according to clause 28, wherein the starting saponin is QS-18 2164 B V2.
[2324] Clause 31. The method according to clause 15, wherein the starting saponin is a desglucosyl-QS-17 family component.
[2325] Clause 32. The method according to clause 31, wherein the starting saponin is a desglucosyl-QS-17 2134 A component.
[2326] Clause 33. The method according to clause 32, wherein the starting saponin is desglucosyl-QS-17 2134 A V1.
[2327] Clause 34. The method according to clause 32, wherein the starting saponin is desglucosyl-QS-17 2134 A V2.
[2328] Clause 35. The method according to clause 31, wherein the starting saponin is desglucosyl-QS-17 2002 A component.
[2329] Clause 36. The method according to clause 31, wherein the starting saponin is a desglucosyl-QS-17 2148 A component.
[2330] Clause 37. The method according to clause 36, wherein the starting saponin is desglucosyl-QS-17 2148 A V1.
[2331] Clause 38. The method according to clause 36, wherein the starting saponin is desglucosyl-QS-17 2148 A V2.
[2332] Clause 39. The method according to clause 31, wherein the starting saponin is a desglucosyl-QS-17 2134 B component.
[2333] Clause 40. The method according to clause 39, wherein the starting saponin is desglucosyl-QS-17 2134 B V1.
[2334] Clause 41. The method according to clause 39, wherein the starting saponin is desglucosyl-QS-17 2134 B V2.
[2335] Clause 42. The method according to clause 31, wherein the starting saponin is desglucosyl-QS-17 2002 B component.
[2336] Clause 43. The method according to clause 31, wherein the starting saponin is a desglucosyl-QS-17 2148 B component.
[2337] Clause 44. The method according to clause 43, wherein the starting saponin is desglucosyl-QS-17 2148 B V1.
[2338] Clause 45. The method according to clause 43, wherein the starting saponin is desglucosyl-QS-17 2148 B V2.
[2339] Clause 46. The method according to clause 15, wherein the starting saponin is a QS-17 family component.
[2340] Clause 47. The method according to clause 46, wherein the starting saponin is a QS-17 2296 A component.
[2341] Clause 48. The method according to clause 47, wherein the starting saponin is QS-17 2296 A V1.
[2342] Clause 49. The method according to clause 48, wherein the starting saponin is QS-17 2296 A V2.
[2343] Clause 50. The method according to clause 46, wherein the starting saponin is QS-17 2164 A component.
[2344] Clause 51. The method according to clause 46, wherein the starting saponin is a QS-17 2310 A component.
[2345] Clause 52. The method according to clause 51, wherein the starting saponin is QS-17 2310 A V1.
[2346] Clause 53. The method according to clause 51, wherein the starting saponin is QS-17 2310 A V2.
[2347] Clause 54. The method according to clause 46, wherein the starting saponin is a QS-17 2296 B component.
[2348] Clause 55. The method according to clause 54, wherein the starting saponin is QS-17 2296 B V1.
[2349] Clause 56. The method according to clause 54, wherein the starting saponin is QS-17 2296 B V2.
[2350] Clause 57. The method according to clause 46, wherein the starting saponin is QS-17 2164 B component.
[2351] Clause 58. The method according to clause 46, wherein the starting saponin is a QS-17 2310 B component.
[2352] Clause 59. The method according to clause 58, wherein the starting saponin is QS-17 2310 B V1
[2353] Clause 60. The method according to clause 58, wherein the starting saponin is QS-17 2310 B V2.
[2354] Clause 61. The method according to clause 15, wherein the starting saponin is a desarabinofuranosyl-QS-18 family component.
[2355] Clause 62. The method according to clause 61, wherein the starting saponin is a desarabinofuranosyl-QS-18 2018 A component.
[2356] Clause 63. The method according to clause 62, wherein the starting saponin is desarabinofuranosyl-QS-18 2018 A V1.
[2357] Clause 64. The method according to clause 62, wherein the starting saponin is desarabinofuranosyl-QS-18 2018 A V2.
[2358] Clause 65. The method according to clause 61, wherein the starting saponin is desarabinofuranosyl-QS-18 1886 A component.
[2359] Clause 66. The method according to clause 61, wherein the starting saponin is a desarabinofuranosyl-QS-18 2032 A component.
[2360] Clause 67. The method according to clause 65, wherein the starting saponin is desarabinofuranosyl-QS-18 2032 A V1.
[2361] Clause 68. The method according to clause 65, wherein the starting saponin is desarabinofuranosyl-QS-18 2032 A V2.
[2362] Clause 69. The method according to clause 61, wherein the starting saponin is a desarabinofuranosyl-QS-18 2018 B component.
[2363] Clause 70. The method according to clause 69, wherein the starting saponin is desarabinofuranosyl-QS-18 2018 B V1.
[2364] Clause 71. The method according to clause 69, wherein the starting saponin is desarabinofuranosyl-QS-18 2018 B V2.
[2365] Clause 72. The method according to clause 61, wherein the starting saponin is desarabinofuranosyl-QS-18 1886 B component.
[2366] Clause 73. The method according to clause 61, wherein the starting saponin is a desarabinofuranosyl-QS-18 2032 B component.
[2367] Clause 74. The method according to clause 73, wherein the starting saponin is desarabinofuranosyl-QS-18 2032 B V1.
[2368] Clause 75. The method according to clause 73, wherein the starting saponin is desarabinofuranosyl-QS-18 2032 B V2.
[2369] Clause 76. The method according to clause 15, wherein the starting saponin is an acetylated desglucosyl-QS-17 family component.
[2370] Clause 77. The method according to clause 76, wherein the starting saponin is an acetylated desglucosyl-QS-17 2176 A component.
[2371] Clause 78. The method according to clause 77, wherein the starting saponin is acetylated desglucosyl-QS-17 2176 A V1.
[2372] Clause 79. The method according to clause 77, wherein the starting saponin is acetylated desglucosyl-QS-17 2176 A V2.
[2373] Clause 80. The method according to clause 76, wherein the starting saponin is acetylated desglucosyl-QS-17 2044 A component.
[2374] Clause 81. The method according to clause 76, wherein the starting saponin is an acetylated desglucosyl-QS-17 2190 A component.
[2375] Clause 82. The method according to clause 81, wherein the starting saponin is acetylated desglucosyl-QS-17 2190 A V1.
[2376] Clause 83. The method according to clause 81, wherein the starting saponin is acetylated desglucosyl-QS-17 2190 A V2.
[2377] Clause 84. The method according to any one of clauses 1 to 83, wherein the product saponin is a naturally occurring saponin.
[2378] Clause 85. The method according to any one of clauses 1 to 83, wherein the product saponin is an artificial saponin.
[2379] Clause 86. The method according to any one of clauses 1 to 85, wherein the product saponin is a steroid glycoside.
[2380] Clause 87. The method according to any one of clauses 1 to 85, wherein the product saponin is a terpenoid glycoside.
[2381] Clause 88. The method according to clause 87, wherein the product saponin is a triterpenoid glycoside.
[2382] Clause 89. The method according to clause 88, wherein the product saponin is a quillaic acid glycoside.
[2383] Clause 90. The method according to any one of clauses 1 to 84 or 86 to 89, wherein the product saponin is obtainable from plants of the genera Gypsophilia, Saponaria or Quillaja.
[2384] Clause 91. The method according to clause 90, wherein the product saponin is obtainable Quillaja species.
[2385] Clause 92. The method according to clause 91, wherein the product saponin is obtainable from Quillaja brasiliensis.
[2386] Clause 93. The method according to clause 92, wherein the product saponin is obtainable from Quillaja saponaria.
[2387] Clause 94. The method according to any one of clauses 16, 31 or 93, wherein the product saponin is a QS-21 family component.
[2388] Clause 95. The method according to any one of clauses 17, 32 or 94, wherein the product saponin is a QS-21 1988 A component.
[2389] Clause 96. The method according to any one of clauses 18, 33 or 95, wherein the product saponin is QS-21 1988 A V1.
[2390] Clause 97. The method according to any one of clauses 19, 34 or 95, wherein the product saponin is QS-21 1988 A V2.
[2391] Clause 98. The method according to any one of clauses 20, 35 or 94, wherein the product saponin is QS-21 1856 A component.
[2392] Clause 99. The method according to any one of clauses 21, 36 or 94, wherein the product saponin is a QS-21 2002 A component.
[2393] Clause 100. The method according to any one of clauses 22, 37 or 99, wherein the product saponin is QS-21 2002 A V1.
[2394] Clause 101. The method according to any one of clauses 23, 38 or 99, wherein the product saponin is QS-21 2002 A V2.
[2395] Clause 102. The method according to any one of clauses 24, 39 or 94, wherein the product saponin is a QS-21 1988 B component.
[2396] Clause 103. The method according to any one of clauses 25, 40 or 102, wherein the product saponin is QS-21 1988 B V1.
[2397] Clause 104. The method according to any one of clauses 26, 41 or 102, wherein the product saponin is QS-21 1988 B V2.
[2398] Clause 105. The method according to any one of clauses 27, 42 or 94, wherein the product saponin is QS-21 1856 B component.
[2399] Clause 106. The method according to any one of clauses 28, 43 or 94, wherein the product saponin is a QS-21 2002 B component.
[2400] Clause 107. The method according to any one of clauses 29, 44 or 106, wherein the product saponin is QS-21 2002 B V1.
[2401] Clause 108. The method according to any one of clauses 30, 45 or 106, wherein the product saponin is QS-21 2002 B V2.
[2402] Clause 109. The method according to either clause 46 or 93, wherein the product saponin is a QS-18 family component.
[2403] Clause 110. The method according to either clause 47 or 109, wherein the product saponin is a QS-18 2150 A component.
[2404] Clause 111. The method according to either clause 48 or 110, wherein the product saponin is QS-18 2150 A V1.
[2405] Clause 112. The method according to either clause 49 or 110, wherein the product saponin is QS-18 2150 A V2.
[2406] Clause 113. The method according to either clause 50 or 109, wherein the product saponin is QS-18 2018 A component.
[2407] Clause 114. The method according to either clause 51 or 109, wherein the product saponin is a QS-18 2164 A component.
[2408] Clause 115. The method according to either clause 52 or 114, wherein the product saponin is QS-18 2164 A V1.
[2409] Clause 116. The method according to either clause 53 or 114, wherein the product saponin is QS-18 2164 A V2.
[2410] Clause 117. The method according to either clause 54 or 109, wherein the product saponin is a QS-18 2150 B component.
[2411] Clause 118. The method according to either clause 55 or 117, wherein the product saponin is QS-18 2150 B V1.
[2412] Clause 119. The method according to either clause 56 or 117, wherein the product saponin is QS-18 2150 B V2.
[2413] Clause 120. The method according to either clause 57 or 109, wherein the product saponin is QS-18 2018 B component.
[2414] Clause 121. The method according to either clause 58 or 120, wherein the product saponin is a QS-18 2164 B component.
[2415] Clause 122. The method according to either clause 59 or 121, wherein the product saponin is QS-18 2164 B V1.
[2416] Clause 123. The method according to either clause 60 or 121, wherein the product saponin is QS-18 2164 B V2.
[2417] Clause 124. The method according to either clause 46 or 93, wherein the product saponin is a desglucosyl-QS-17 family component.
[2418] Clause 125. The method according to either clause 47 or 124, wherein the product saponin is a desglucosyl-QS-17 2134 A component.
[2419] Clause 126. The method according to either clause 48 or 125, wherein the product saponin is desglucosyl-QS-17 2134 A V1.
[2420] Clause 127. The method according to either clause 49 or 125, wherein the product saponin is desglucosyl-QS-17 2134 A V2.
[2421] Clause 128. The method according to either clause 50 or 124, wherein the product saponin is desglucosyl-QS-17 2002 A component.
[2422] Clause 129. The method according to either clause 51 or 124, wherein the product saponin is a desglucosyl-QS-17 2148 A component.
[2423] Clause 130. The method according to either clause 52 or 129, wherein the product saponin is desglucosyl-QS-17 2148 A V1.
[2424] Clause 131. The method according to either clause 53 or 129, wherein the product saponin is desglucosyl-QS-17 2148 A V2.
[2425] Clause 132. The method according to either clause 54 or 124, wherein the product saponin is a desglucosyl-QS-17 2134 B component.
[2426] Clause 133. The method according to either clause 55 or 132, wherein the product saponin is desglucosyl-QS-17 2134B V1.
[2427] Clause 134. The method according to either clause 56 or 132, wherein the product saponin is desglucosyl-QS-17 2134 B V2.
[2428] Clause 135. The method according to either clause 57 or 124, wherein the product saponin is desglucosyl-QS-17 2002 B component.
[2429] Clause 136. The method according to either clause 58 or 124, wherein the product saponin is a desglucosyl-QS-17 2148 B component.
[2430] Clause 137. The method according to either clause 59 or 136, wherein the product saponin is desglucosyl-QS-17 2148 B V1.
[2431] Clause 138. The method according to either clause 60 or 136, wherein the product saponin is desglucosyl-QS-17 2148 B V2.
[2432] Clause 140. The method according to either clause 61 or 93, wherein the product saponin is a desarabinofuranosyl-QS-21 family component.
[2433] Clause 140. The method according to either clause 62 or 139, wherein the product saponin is a desarabinofuranosyl-QS-21 1856 A component.
[2434] Clause 141. The method according to either clause 63 or 140, wherein the product saponin is desarabinofuranosyl-QS-21 1856 A V1.
[2435] Clause 142. The method according to either clause 64 or 140, wherein the product saponin is desarabinofuranosyl-QS-21 1856 A V2.
[2436] Clause 143. The method according to either clause 65 or 139, wherein the product saponin is desarabinofuranosyl-QS-21 1712 A component.
[2437] Clause 144. The method according to either clause 66 or 139, wherein the product saponin is a desarabinofuranosyl-QS-21 1870 A component.
[2438] Clause 145. The method according to either clause 67 or 144, wherein the product saponin is desarabinofuranosyl-QS-21 1870 A V1.
[2439] Clause 146. The method according to either clause 68 or 144, wherein the product saponin is desarabinofuranosyl-QS-21 1870 A V2.
[2440] Clause 147. The method according to either clause 69 or 139, wherein the product saponin is a desarabinofuranosyl-QS-21 1856 B component.
[2441] Clause 148. The method according to either clause 70 or 147, wherein the product saponin is desarabinofuranosyl-QS-21 1856 B V1.
[2442] Clause 149. The method according to either clause 71 or 147, wherein the product saponin is desarabinofuranosyl-QS-21 1856 B V2.
[2443] Clause 150. The method according to either clause 72 or 139, wherein the product saponin is desarabinofuranosyl-QS-21 1712 B component.
[2444] Clause 151. The method according to either clause 73 or 139, wherein the product saponin is a desarabinofuranosyl-QS-21 1870 B component.
[2445] Clause 152. The method according to either clause 74 or 151, wherein the product saponin is desarabinofuranosyl-QS-21 1870 B V1.
[2446] Clause 153. The method according to either clause 75 or 151, wherein the product saponin is desarabinofuranosyl-QS-21 1870 B V2.
[2447] Clause 154. The method according to either clause 76 or 93, wherein the product saponin is an acetylated QS-21 family component.
[2448] Clause 155. The method according to either clause 77 or 154, wherein the product saponin is an acetylated QS-21 2030 A component.
[2449] Clause 156. The method according to either clause 78 or 155, wherein the product saponin is acetylated QS-21 2030 A V1.
[2450] Clause 157. The method according to either clause 79 or 155, wherein the product saponin is acetylated QS-21 2030 A V2.
[2451] Clause 158. The method according to either clause 80 or 154, wherein the product saponin is acetylated QS-21 1898 A component.
[2452] Clause 159. The method according to either clause 81 or 155, wherein the product saponin is an acetylated QS-21 2044 A component.
[2453] Clause 160. The method according to either clause 82 or 159, wherein the product saponin is acetylated QS-21 2044 A V1.
[2454] Clause 161. The method according to either clause 83 or 159, wherein the product saponin is acetylated QS-21 2044 A V2.
[2455] Clause 162. The method according to any one of clauses 1 to 161, wherein a single starting saponin is converted to a single product saponin.
[2456] Clause 163. The method according to any one of clauses 1 to 161, wherein a plurality of starting saponins are converted to a plurality of product saponins.
[2457] Clause 164. The method according to clause 163, wherein the plurality of starting saponins comprises QS-18 family components, such as described in any one of clauses 18 to 31.
[2458] Clause 165. The method according to either clause 163 or 164, wherein the plurality of starting saponins comprises desglucosyl-QS-17 family components, such as described in any one of clauses 33 to 46.
[2459] Clause 166. The method according to any one of clauses 163 to 165, wherein the plurality of starting saponins comprises QS-17 family components, such as described in any one of clauses 48 to 61.
[2460] Clause 167. The method according to any one of clauses 163 to 166, wherein the plurality of starting saponins comprises desarabinofuranosyl-QS-18 family components, such as described in any one of clauses 63 to 76.
[2461] Clause 169. The method according to any one of clauses 163 to 167, wherein the plurality of starting saponins comprises acetylated desglucosyl-QS-17 family components, such as described in any one of clauses 78 to 84.
[2462] Clause 169. The method according to any one of clauses 1 to 4 or 6 to 168, wherein the starting saponin is obtained by extraction from starting material.
[2463] Clause 170. The method according to clause 169, wherein the starting saponin is obtained by extraction from plant material.
[2464] Clause 171. The method according to clause 170, wherein the starting saponin is obtained by extraction from plant material from plants of the genera Gypsophilia, Saponaria or Quillaja.
[2465] Clause 172. The method according to clause 171, wherein the starting saponin is obtained by extraction from plant material obtained from Quillaja species.
[2466] Clause 173. The method according to clause 172, wherein the starting saponin is obtained by extraction from plant material obtained from Quillaja brasiliensis.
[2467] Clause 174. The method according to clause 172, wherein the starting saponin is obtained by extraction from plant material obtained from Quillaja saponaria.
[2468] Clause 175. The method according to any one of clauses 169 to 174, wherein the starting saponin is obtained by extraction from complete plants.
[2469] Clause 176. The method according to any one of clauses 169 to 174, wherein the starting saponin is obtained by extraction from selected plant tissues.
[2470] Clause 177. The method according to clause 176, wherein the starting saponin is obtained by extraction from plant material including wood or bark, such as plant material which is wood or bark.
[2471] Clause 178. The method according to clause 177, wherein the starting saponin is obtained by extraction from plant material including bark, such as plant material which is bark.
[2472] Clause 179. The method according to any one of clauses 169 to 188, wherein the starting saponin is obtained by extraction from plant material obtained from an adult plant.
[2473] Clause 180. The method according to any one of clauses 169 to 179, wherein the starting saponin is obtained by extraction from plant material obtained from a young plant.
[2474] Clause 181. The method according to any one of clauses 169 to 180, wherein the starting saponin is obtained by extraction using water and/or lower alcohols.
[2475] Clause 182. The method according to clause 181, wherein the starting saponin is obtained by aqueous extraction.
[2476] Clause 183. The method according to any one of clauses 1 to 182, wherein the starting saponin is a minor component in a saponin containing composition, such as a minor component in a plant material extract.
[2477] Clause 184. The method according to any one of clauses 1 to 182, wherein the starting saponin is a major component in a saponin containing composition, such as a major component in a plant material extract.
[2478] Clause 185. The method according to any one of clauses 169 to 184, wherein the starting saponin is partially purified.
[2479] Clause 186. The method according to any one of clauses 169 to 184, wherein the starting saponin is substantially purified.
[2480] Clause 187. The method according to any one of clauses 169 to 184, wherein the starting saponin is in the form of a component of Quil A.
[2481] Clause 188. The method according to any one of clauses 169 to 184, wherein the starting saponin is in the form of a component of Fraction A.
[2482] Clause 189. The method according to any one of clauses 169 to 184, wherein the starting saponin is in the form of a component of Fraction B.
[2483] Clause 190. The method according to any one of clauses 169 to 184, wherein the starting saponin is in the form of a component of Fraction C.
[2484] Clause 191. The method according to any one of clauses 169 to 184, wherein the starting saponin is in the form of a component of QS-7.
[2485] Clause 192. The method according to any one of clauses 169 to 184, wherein the starting saponin is in the form of a component of QS-17.
[2486] Clause 193. The method according to any one of clauses 169 to 184, wherein the starting saponin is in the form of a component of QS-18.
[2487] Clause 194. The method according to any one of clauses 169 to 184, wherein the starting saponin is in the form of a component of QS-21.
[2488] Clause 195. The method according to any one of clauses 169 to 184, wherein the starting saponin is in the form of a component of a crude bark extract.
[2489] Clause 196. The method according to any one of clauses 169 to 195, further comprising the step of extracting the starting saponin from the starting material.
[2490] Clause 197. The method according to any one of clauses 1 to 194 or 196, further comprising the step of purifying the starting saponin from extracted material.
[2491] Clause 198. The method according to any one of clauses 1 to 197, wherein the enzymatic conversion involves the removal of a single sugar residue.
[2492] Clause 199. The method according to clause 198, wherein the enzymatic conversion involves the removal of a glucose residue.
[2493] Clause 200. The method according to clause 199, wherein the enzymatic conversion involves the removal of a beta-glucose residue.
[2494] Clause 201. The method according to clause 200, wherein the enzymatic conversion involves the removal of the beta-glucose residue:
[2495] Clause 202. The method according to clause 198, wherein the enzymatic conversion involves the removal of a rhamnose residue.
[2496] Clause 203. The method according to clause 202, wherein the enzymatic conversion involves the removal of a alpha-rhamnose residue.
[2497] Clause 204. The method according to clause 203, wherein the enzymatic conversion involves the removal of the alpha-rhamnose residue:
[2498] Clause 205. The method according to any one of clauses 1 to 197, wherein the enzymatic conversion involves the removal of a plurality of sugar residues.
[2499] Clause 206. The method according to any one of clauses 1 to 205, wherein the method involves multiple enzymatic conversions.
[2500] Clause 207. The method according to clause 206, wherein the multiple enzymatic conversions are undertaken in series.
[2501] Clause 208. The method according to clause 206, wherein the multiple enzymatic conversions are undertaken in parallel.
[2502] Clause 209. The method according to any one of clauses 206 to 208, wherein the multiple enzymatic conversions comprise, such as consist of, the removal of glucose and rhamnose.
[2503] Clause 210. The method according to clause 209, wherein the multiple enzymatic conversions comprise, such as consist of, the removal of a beta-glucose residue and an alpha-rhamnose residue.
[2504] Clause 211. The method according to clause 210, wherein the multiple enzymatic conversions comprise, such as consist of, the removal of:
[2505] Clause 212. The method according to any one of clauses 1 to 30, 46 to 75, 84 to 108, 124 to 153 or 162 to 197 wherein the enzymatic conversion is carried out by an enzyme demonstrating beta exo glucosidase activity.
[2506] Clause 213. The method according to any one of clauses 1 to 15, 31 to 45, 76 to 123 or 154 to 197 wherein the enzymatic conversion is carried out by an enzyme demonstrating alpha exo rhamnosidase activity.
[2507] Clause 214. The method according to any one of clauses 1 to 213, wherein the glycosidase is of external origin.
[2508] Clause 215. The method according to any one of clauses 1 to 214, wherein the enzymatic conversion occurs in an extra cellular environment.
[2509] Clause 216. The method according to any one of clauses 1 to 215, wherein the glycosidase is recombinantly produced.
[2510] Clause 217. The method according to any one of clauses 1 to 216, wherein the glycosidase is provided in the form of a lysate, such as a clarified lysate and in particular an E. coli lysate or clarified lysate.
[2511] Clause 218. The method according to any one of clauses 1 to 217, further comprising the step of purifying the product saponin.
[2512] Clause 219. The method according to any one of clauses 1 to 218, wherein the enzymatic conversion is undertaken at pH 4 to 9, especially pH 5 to 8, and in particular pH to 7.5 such as pH 5.5 to 6.5.
[2513] Clause 220. The method according to any one of clauses 1 to 219, wherein the enzymatic conversion is undertaken at 10 degC to 60 degC, especially 15 degC to 50 degC, in particular 15 degC to 45 degC, such as 20 degC to 42 degC.
[2514] Clause 221. The method according to any one of clauses 1 to 220, wherein the enzymatic conversion occurs over a period of up to 2 days, especially up to 1 day, in particular up to 18 hrs, such as 12 hrs, for example up to 6 hrs.
[2515] Clause 222. The method according to any one of clauses 1 to 221, wherein the enzymatic conversion occurs in water or an aqueous solution with water miscible co-solvent(s).
[2516] Clause 223. The method according to any one of clauses 1 to 222, wherein the starting saponins are present at a concentration of 0.001 to 100 g per litre, especially to 75 g per litre, in particular 0.01 to 50 g per litre, such as 0.1 to 25 g per litre, for example 1 to 10 g per litre.
[2517] Clause 224. The method according to any one of clauses 1 to 223, wherein the enzymatic conversion occurs in a batch reaction volume of 500 ml to 2000 L, especially 1 L to 1000 L, in particular 10 L to 500 L, such as 25 L to 200 L.
[2518] Clause 225. The method according to any one of clauses 1 to 224, wherein the weight of each glycosidase present is in the range of 0.0001 mg to 25 mg per ml, especially 0.0001 mg to 5 mg per ml, in particular 0.0001 mg to 1 mg per ml, such as 0.001 mg to 0.5 mg per ml.
[2519] Clause 226. The method according to any one of clauses 1 to 225, wherein the weight of each glycosidase present is in the range of 0.01 mg to 100 mg of dried clarified lysate per ml, especially 0.01 mg to 30 mg per ml, in particular 0.01 mg to 5 mg per ml, such as 0.01 mg to 1 mg per ml.
[2520] Clause 227. Use of a glycosidase for enzymatically converting a starting saponin to the product saponin, such as in a method of any one of clauses 1 to 226.
[2521] Clause 228. The method or use according to any one of clauses 212 or 214 to 227, wherein the glucosidase comprises, such as consists of, an amino acid sequence according to SEQ ID No. 262, 208, 63, 229, 250, 5, 101, 207, 169, 247, 302, 324, 319, 9, 240, 325, 338, 850, 879, 868, 826, 804, 888, 881, 891, 816, 827, 857, 853, 842, 814, 886, 885, 838, 829, 808, 828, 870, 873, 844, 882, 874, 825, 824, 823, 810, 894, 849, 803, 890, 841, 832, 830, 845, 871, 837, 883 or 809 or functional variants thereof.
[2522] Clause 229. A method for identifying a candidate enzyme having beta exo glucosidase activity, comprising selecting an enzyme comprising, such as consisting of, an amino acid sequence according to SEQ ID No. 262, 208, 63, 229, 250, 5, 101, 207, 169, 247, 302, 324, 319, 9, 240, 325, 338, 850, 879, 868, 826, 804, 888, 881, 891, 816, 827, 857, 853, 842, 814, 886, 885, 838, 829, 808, 828, 870, 873, 844, 882, 874, 825, 824, 823, 810, 894, 849, 803, 890, 841, 832, 830, 845, 871, 837, 883 or 809 or functional variants thereof.
[2523] Clause 230. A method for identifying an enzyme having beta exo glucosidase activity, comprising testing a glycosidase, such as an enzyme comprising, such as consisting of, an amino acid sequence according to SEQ ID No. 262, 208, 63, 229, 250, 5, 101, 207, 169, 247, 302, 324, 319, 9, 240, 325, 338, 850, 879, 868, 826, 804, 888, 881, 891, 816, 827, 857, 853, 842, 814, 886, 885, 838, 829, 808, 828, 870, 873, 844, 882, 874, 825, 824, 823, 810, 894, 849, 803, 890, 841, 832, 830, 845, 871, 837, 883 or 809 or functional variants thereof, for ability to remove glucose from a saponin.
[2524] Clause 231. The use or method according to any one of clauses 227 to 230, wherein the enzyme comprises, such as consists of, an amino acid sequence according to SEQ ID No. 262, 208, 63, 229, 250, 5, 101, 207, 169, 247, 302, 324, 319, 9, 240, 325 or 338, or functional variants thereof.
[2525] Clause 232. The use or method according to clause 231, wherein the enzyme comprises, such as consists of, an amino acid sequence according to SEQ ID No. 262, 208, 63, 229, 250, 5, 101, 207, 169, 247, 302, 324 or 319, or functional variants thereof.
[2526] Clause 233. The use or method according to clause 232, wherein the enzyme comprises, such as consists of, an amino acid sequence according to SEQ ID No. 262, 208, 63, 229, 250, 5, 101 or 207, or functional variants thereof.
[2527] Clause 234. The use or method according to clause 233, wherein the enzyme comprises, such as consists of, an amino acid sequence according to SEQ ID No. 262, or functional variants thereof.
[2528] Clause 235. The use or method according to clause 234, wherein the enzyme is an engineered glucosidase polypeptide according to any one of clauses 260 to 355.
[2529] Clause 236. The use or method according to any one of clauses 227 to 230, wherein the enzyme comprises, such as consists of, an amino acid sequence according to SEQ ID No. 850, 879, 868, 826, 804, 888, 881, 891, 816, 827, 857, 853, 842, 814, 886, 885, 838, 829, 808, 828, 870, 873, 844, 882, 874, 825, 824, 823, 810, 894, 849, 803, 890, 841, 832, 830, 845, 871, 837, 883 or 809, or functional variants thereof.
[2530] Clause 237. The use or method according to clause 236, wherein the enzyme comprises, such as consists of, an amino acid sequence according to SEQ ID No. 850, 879, 868, 826, 804, 888, 881, 891, 816, 827, 857, 853, 842, 814, 886, 885, 838, 829, 808, 828, 870, 873, 844, 882, 874, 825, 824, 823, 810, 894, 849, 803, 890 or 841, or functional variants thereof.
[2531] Clause 238. The use or method according to clause 237, wherein the enzyme comprises, such as consists of, an amino acid sequence according to SEQ ID No. 850, 879, 868, 826, 804, 888, 881, 891, 816, 827, 857, 853, 842, 814, 886, 885, 838, 829, 808, 828, 870, 873, 844, 882, 874, 825, 824, 823, 810 or 894, or functional variants thereof.
[2532] Clause 239. The method or use according to any one of clauses 213 to 227, wherein the rhamnosidase comprises, such as consists of, an amino acid sequence according to SEQ ID No. 992, 1003, 1052, 1073, 1017, 1055, 1075, 1001, 1007, 1061, 1079, 1027, 1039, 1041, 989, 1053, 1018, 1066, 1082, 1076, 993, 1077, 1046, 1015, 1063, 1054, 1074, 1067 or 1033, or functional variants thereof.
[2533] Clause 240. A method for identifying a candidate enzyme having alpha exo rhamnosidase activity, comprising selecting an enzyme comprising, such as consisting of, an amino acid sequence according to SEQ ID No. 992, 1003, 1052, 1073, 1017, 1055, 1075, 1001, 1007, 1061, 1079, 1027, 1039, 1041, 989, 1053, 1018, 1066, 1082, 1076, 993, 1077, 1046, 1015, 1063, 1054, 1074, 1067 or 1033, or functional variants thereof.
[2534] Clause 241. A method for identifying an enzyme having alpha exo rhamnosidase activity, comprising testing a glycosidase, such as enzyme comprising, such as consisting of, an amino acid sequence according to SEQ ID No. 992, 1003, 1052, 1073, 1017, 1055, 1075, 1001, 1007, 1061, 1079, 1027, 1039, 1041, 989, 1053, 1018, 1066, 1082, 1076, 993, 1077, 1046, 1015, 1063, 1054, 1074, 1067 or 1033, or functional variants thereof for ability to remove rhamnose from a saponin.
[2535] Clause 242. The use or method according to any one of clauses 239 to 241, wherein the enzyme comprises, such as consists of, an amino acid sequence according to SEQ ID No. 992, 1003, 1052, 1073, 1017, 1055, 1075, 1001, 1007, 1061, 1079, 1027, 1039, 1041, 989, 1053, 1018, 1066, 1082, 1076, 993 or 1077, or functional variants thereof.
[2536] Clause 243. The use or method according to clause 242, wherein the enzyme comprises, such as consists of, an amino acid sequence according to SEQ ID No. 992, 1003, 1052, 1073, 1017, 1055, 1075, 1001, 1007, 1061, 1079, 1027, 1039, 1041 or 989, or functional variants thereof.
[2537] Clause 244. The use or method according to clause 243, wherein the enzyme comprises, such as consists of, an amino acid sequence according to SEQ ID No. 1017, or functional variants thereof.
[2538] Clause 245. The use or method according to clause 243, wherein the enzyme is an engineered rhamnosidase polypeptide according to any one of clauses 376 to 463.
[2539] Clause 246. The use or method according to any one of clauses 228 to 245, wherein the functional variant comprises a sequence having at least 80% identity to the reference sequence, especially at least 90%, in particular at least 95%, such as at least 98%, for example at least 99% identity.
[2540] Clause 247. The use or method according to any one of clauses 228 to 245, wherein the functional variant comprises a sequence having a fragment of at least at least 100, especially at least 200, particularly at least 300, such as at least 400, for example at least 500 contiguous amino acids of the reference sequence.
[2541] Clause 248. The use or method according to any one of clauses 228 to 245, wherein the functional variant comprises a sequence having 1 to 20 additions, deletions and/or substitutions relative to the reference sequence, especially 1 to 15 additions, deletions and/or substitutions, particularly 1 to 10 additions, deletions and/or substitutions, such as 1 to 5 additions, deletions and/or substitutions.
[2542] Clause 249. The use or method according to any one of clauses 228 to 245, wherein the enzyme comprises, such as consists of, a reference sequence.
[2543] Clause 250. A saponin prepared by the method of any one of clauses 1 to 226, 228, 231 to 239 or 242 to 249.
[2544] Clause 251. A saponin containing composition comprising a product saponin prepared by the method of any one of clauses 1 to 226, 228, 231 to 239 or 242 to 249.
[2545] Clause 252. The saponin containing composition according to clause 251, comprising QS-21 family components.
[2546] Clause 253. An adjuvant composition comprising a saponin or saponin containing composition according to any one of clauses 250 to 252.
[2547] Clause 254. An adjuvant composition prepared using a saponin or saponin containing composition according to any one of clauses 250 to 252.
[2548] Clause 255. Use of a saponin or saponin containing composition according to any one of clauses 250 to 252 in the manufacture of an adjuvant composition.
[2549] Clause 256. An immunogenic composition comprising a saponin or saponin containing composition according to any one of clauses 250 to 252 and an antigen.
[2550] Clause 257. An immunogenic composition comprising a saponin or saponin containing composition according to any one of clauses 250 to 252 and a polynucleotide encoding an antigen.
[2551] Clause 258. A kit of parts comprising:
   [2552] (i) a saponin or saponin containing composition according to any one of clauses 250 to 252
   [2553] (ii) an antigen.
[2554] Clause 259. A kit of parts comprising:
   [2555] (i) a saponin or saponin composition according to any one of clauses 250 to 252
   [2556] (ii) a polynucleotide encoding an antigen.
[2557] Clause 260. An engineered glucosidase polypeptide comprising an amino acid sequence that is at least 80% identical to the amino acid sequence of SEQ ID No. 262, or a functional fragment thereof, wherein the engineered glucosidase polypeptide includes at least one residue substitution from:
   [2558] F44Y;
   [2559] V60L;
   [2560] G117A;
   [2561] F170N;
   [2562] V263G or V263L;
   [2563] N351H or N351Q;
   [2564] A355H, A355I, A355L, A355M, A355R, A355T or A355W;
   [2565] A356P;
   [2566] R357A, R357C, R357K, R357M or R357Q;
   [2567] G362C;
   [2568] T365A, T365N or T365S;
   [2569] L367C;
   [2570] V394R;
   [2571] V395Y;
   [2572] Q396E, Q396G, Q396N, Q396P, Q396R, Q396S or Q396Y;
   [2573] F430W;
   [2574] R435F;
   [2575] V438T;
   [2576] V440F;
   [2577] F442M or F442Q;
   [2578] G444T;
   [2579] A473F or A473R;
   [2580] L474C, L474I or L474V;
   [2581] I475F;
   [2582] L492C, L492G, L492H, L492I, L492N, L492Q, L492V, L492W or L492Y;
   [2583] Q493F or Q493H;
   [2584] P494H or P494I;
   [2585] S495I, S495K or S495Q;
   [2586] G496P or G496W;
   [2587] D498A, D498E, D498F, D498I, D498K, D498L, D498N, D498P, D498R, D498S, D498T or D498V;
   [2588] A502R;
   [2589] M504G or M504R;
   [2590] L507A or L507R;
   [2591] T508M;
   [2592] L529M;
   [2593] F535P;
   [2594] A536D or A536E;
   [2595] A537R;
   [2596] F541A, F541I, F541L, F541M or F541V;
   [2597] L542I;
   [2598] Q543G or Q543L;
   [2599] E547L; and
   [2600] Y585W.
[2601] Clause 261. The polypeptide according to clause 260, having one of the substitutions.
[2602] Clause 262. The polypeptide according to clause 260, having two of the substitutions.
[2603] Clause 263. The polypeptide according to clause 260, having three of the substitutions.
[2604] Clause 264. The polypeptide according to clause 260, having four of the substitutions.
[2605] Clause 265. The polypeptide according to clause 260, having five of the substitutions.
[2606] Clause 266. The polypeptide according to clause 260, having six of the substitutions.
[2607] Clause 267. The polypeptide according to clause 260, having seven of the substitutions.
[2608] Clause 268. The polypeptide according to clause 260, having eight of the substitutions.
[2609] Clause 269. The polypeptide according to clause 260, having nine of the substitutions.
[2610] Clause 270. The polypeptide according to clause 260, having ten of the substitutions.
[2611] Clause 271. The polypeptide according to clause 260, having eleven of the substitutions.
[2612] Clause 272. The polypeptide according to clause 260, having twelve of the substitutions.
[2613] Clause 273. The polypeptide according to clause 260, having thirteen of the substitutions.
[2614] Clause 274. The polypeptide according to clause 260, having fourteen of the substitutions.
[2615] Clause 275. The polypeptide according to clause 260, having fifteen of the substitutions.
[2616] Clause 276. The polypeptide according to clause 260, having sixteen of the substitutions.
[2617] Clause 277. The polypeptide according to clause 260, having seventeen of the substitutions.
[2618] Clause 277. The polypeptide according to clause 260, having eighteen of the substitutions.
[2619] Clause 278. The polypeptide according to clause 260, having nineteen of the substitutions.
[2620] Clause 279. The polypeptide according to clause 260, having twenty of the substitutions.
[2621] Clause 280. The polypeptide according to clause 260, having twenty-one of the substitutions.
[2622] Clause 281. The polypeptide according to clause 260, having twenty-two of the substitutions.
[2623] Clause 282. The polypeptide according to clause 260, having twenty-three of the substitutions.
[2624] Clause 283. The polypeptide according to clause 260, having twenty-four of the substitutions.
[2625] Clause 284. The polypeptide according to clause 260, having twenty-five of the substitutions.
[2626] Clause 285. The polypeptide according to clause 260, having twenty-six to thirty of the substitutions.
[2627] Clause 286. The polypeptide according to clause 260, having thirty-one to forty-three substitutions of the substitutions.
[2628] Clause 287. The polypeptide according to any one of clauses 260 to 286, comprising F44Y.
[2629] Clause 288. The polypeptide according to any one of clauses 260 to 287, comprising V60L.
[2630] Clause 289. The polypeptide according to any one of clauses 260 to 288, comprising G117A.
[2631] Clause 290. The polypeptide according to any one of clauses 260 to 289, comprising F170N.
[2632] Clause 291. The polypeptide according to any one of clauses 260 to 290, comprising V263G or V263L.
[2633] Clause 292. The polypeptide according to clause 291, comprising V263L.
[2634] Clause 293. The polypeptide according to any one of clauses 260 to 292, comprising N351H or N351Q.
[2635] Clause 294. The polypeptide according to clause 293, comprising N351H.
[2636] Clause 295. The polypeptide according to any one of clauses 260 to 294, comprising A355H, A355I, A355L, A355M, A355R, A355T or A355W.
[2637] Clause 296. The polypeptide according to clause 295, comprising A355H.
[2638] Clause 297. The polypeptide according to clause 295, comprising A355I.
[2639] Clause 298. The polypeptide according to clause 295, comprising A355L.
[2640] Clause 299. The polypeptide according to clause 295, comprising A355M.
[2641] Clause 300. The polypeptide according to clause 295, comprising A355R.
[2642] Clause 301. The polypeptide according to clause 295, comprising A355T.
[2643] Clause 302. The polypeptide according to clause 295, comprising A355W.
[2644] Clause 303. The polypeptide according to any one of clauses 260 to 302, comprising A356P.
[2645] Clause 304. The polypeptide according to any one of clauses 260 to 303, comprising R357A, R357C, R357K, R357M or R357Q.
[2646] Clause 305. The polypeptide according to clause 304, comprising R357M.
[2647] Clause 306. The polypeptide according to any one of clauses 260 to 305, comprising G362C.
[2648] Clause 307. The polypeptide according to any one of clauses 260 to 306, comprising T365A, T365N or T365S.
[2649] Clause 308. The polypeptide according to clause 307, comprising T365N.
[2650] Clause 309. The polypeptide according to any one of clauses 260 to 308, comprising L367C.
[2651] Clause 310. The polypeptide according to any one of clauses 260 to 309, comprising V394R.
[2652] Clause 311. The polypeptide according to any one of clauses 260 to 310, comprising V395Y.
[2653] Clause 312. The polypeptide according to any one of clauses 260 to 311, comprising Q396E, Q396G, Q396N, Q396P, Q396R, Q396S or Q396Y.
[2654] Clause 313. The polypeptide according to clause 312, comprising Q396R.
[2655] Clause 314. The polypeptide according to any one of clauses 260 to 313, comprising F430W.
[2656] Clause 315. The polypeptide according to any one of clauses 260 to 314, comprising R435F.
[2657] Clause 316. The polypeptide according to any one of clauses 260 to 315, comprising V438T.
[2658] Clause 317. The polypeptide according to any one of clauses 260 to 316, comprising V440F.
[2659] Clause 318. The polypeptide according to any one of clauses 260 to 317, comprising F442M or F442Q.
[2660] Clause 319. The polypeptide according to clause 318, comprising F442Q.
[2661] Clause 320. The polypeptide according to any one of clauses 260 to 319, comprising G444T.
[2662] Clause 321. The polypeptide according to any one of clauses 260 to 320, comprising A473F or A473R.
[2663] Clause 322. The polypeptide according to clause 321, comprising A473F.
[2664] Clause 323. The polypeptide according to any one of clauses 260 to 322, comprising L474C, L474I or L474V.
[2665] Clause 324. The polypeptide according to clause 323, comprising L474C.
[2666] Clause 325. The polypeptide according to any one of clauses 260 to 324, comprising I475F.
[2667] Clause 326. The polypeptide according to any one of clauses 260 to 325, comprising L492C, L492G, L492H, L492I, L492N, L492Q, L492V, L492W or L492Y.
[2668] Clause 327. The polypeptide according to clause 326, comprising L492H.
[2669] Clause 328. The polypeptide according to clause 326, comprising L492N.
[2670] Clause 329. The polypeptide according to clause 326, comprising L492V.
[2671] Clause 330. The polypeptide according to any one of clauses 260 to 329, comprising Q493F or Q493H.
[2672] Clause 331. The polypeptide according to any one of clauses 260 to 330, comprising P494I.
[2673] Clause 332. The polypeptide according to any one of clauses 260 to 331, comprising S495I, S495K or S495Q.
[2674] Clause 333. The polypeptide according to any one of clauses 260 to 332, comprising G496P or G496W.
[2675] Clause 334. The polypeptide according to any one of clauses 260 to 333, comprising G496P.
[2676] Clause 335. The polypeptide according to any one of clauses 260 to 334, comprising D498A, D498E, D498F, D498I, D498K, D498L, D498N, D498P, D498R, D498S, D498T or D498V.
[2677] Clause 336. The polypeptide according to clause 335, comprising D498P.
[2678] Clause 337. The polypeptide according to any one of clauses 260 to 336, comprising A502R;
[2679] Clause 338. The polypeptide according to any one of clauses 260 to 337, comprising M504G or M504R.
[2680] Clause 339. The polypeptide according to any one of clauses 260 to 338, comprising M504R.
[2681] Clause 340. The polypeptide according to any one of clauses 260 to 339, comprising L507A or L507R.
[2682] Clause 341. The polypeptide according to clause 340, comprising L507R.
[2683] Clause 342. The polypeptide according to any one of clauses 260 to 341, comprising T508M.
[2684] Clause 343. The polypeptide according to any one of clauses 260 to 342, comprising L529M.
[2685] Clause 344. The polypeptide according to any one of clauses 260 to 343, comprising F535P.
[2686] Clause 345. The polypeptide according to any one of clauses 260 to 344, comprising A536D or A536E.
[2687] Clause 346. The polypeptide according to any one of clauses 260 to 345, comprising A537R.
[2688] Clause 347. The polypeptide according to any one of clauses 260 to 346, comprising F541A, F541I, F541L, F541M or F541V.
[2689] Clause 348. The polypeptide according to clause 347, comprising F541I.
[2690] Clause 349. The polypeptide according to any one of clauses 260 to 348, comprising L542I.
[2691] Clause 350. The polypeptide according to any one of clauses 260 to 349, comprising Q543G or Q543L.
[2692] Clause 351. The polypeptide according to any one of clauses 260 to 350, comprising E547L.
[2693] Clause 352. The polypeptide according to any one of clauses 260 to 351, comprising Y585W.
[2694] Clause 353. The polypeptide according to clause 260, comprising one mutation which is T365N.
[2695] Clause 354. The polypeptide according to clause 260 or 265 to 353, comprising R357M, T365N, A473F, L474C and I475F.
[2696] Clause 355. The polypeptide according to clause 260 or 267 to 353, comprising F44Y, R357M, T365N, F442Q, A473F, L474C and I475F.
[2697] Clause 356. The polypeptide according to clause 260 or 269 to 353, comprising F44Y, V263L, R357M, T365N, F442Q, A473F, L474C, I475F and F541I.
[2698] Clause 357. The polypeptide according to clause 260 to 353, comprising at least one residue substitution from F44Y, V263L, A355W, R357M, T365N, L367C, Q396R, F442Q, L474C, I475F and F541I,
[2699] Clause 358. The polypeptide according to clause 357, comprising F44Y, V263L, A355W, R357M, T365N, L367C, Q396R, F442Q, L474C, 1475F and F541I,
[2700] Clause 359. The polypeptide according to any one of clauses 260 to 358, comprising an amino acid sequence that is at least 80% identical to the amino acid sequence of SEQ ID No. 262, or a functional fragment thereof, wherein the engineered glucosidase polypeptide includes at least one residue substitution from:
   [2701] F44Y;
   [2702] V263L;
   [2703] N351H;
   [2704] A355H, A355M or A355W;
   [2705] R357M;
   [2706] T365N;
   [2707] L367C;
   [2708] Q396R;
   [2709] V438T;
   [2710] F442Q;
   [2711] L474C;
   [2712] I475F;
   [2713] L492V, L492N or L492H,
   [2714] M504R;
   [2715] L507R; and
   [2716] F541I.
[2717] Clause 359. The polypeptide according to any one of clauses 260 to 358 comprising an amino acid sequence that is at least 85% identical to the amino acid sequence of SEQ ID No. 262.
[2718] Clause 360. The polypeptide according to any one of clauses 260 to 358 comprising an amino acid sequence that is at least 90% identical to the amino acid sequence of SEQ ID No. 262.
[2719] Clause 361. The polypeptide according to any one of clauses 260 to 358 comprising an amino acid sequence that is at least 95% identical to the amino acid sequence of SEQ ID No. 262.
[2720] Clause 362. The polypeptide according to any one of clauses 260 to 358 comprising an amino acid sequence that is at least 98% identical to the amino acid sequence of SEQ ID No. 262.
[2721] Clause 363. The polypeptide according to any one of clauses 260 to 358, wherein the functional variant comprises a sequence having a fragment of at least 100, especially at least 200, particularly at least 300, such as at least 400, for example at least 500 contiguous amino acids of SEQ ID No. 262.
[2722] Clause 364. The polypeptide according to clause 260, comprising the amino acid sequence of SEQ ID No. 1179.
[2723] Clause 365. The polypeptide according to clause 260, comprising the amino acid sequence of SEQ ID No. 1180.
[2724] Clause 366. The polypeptide according to clause 260, comprising the amino acid sequence of SEQ ID No. 1181.
[2725] Clause 367. The polypeptide according to clause 260, comprising the amino acid sequence of SEQ ID No. 1182.
[2726] Clause 368. The polypeptide according to clause 260, comprising the amino acid sequence of SEQ ID No. 1183.
[2727] Clause 369. The polypeptide according to any one of clauses 260 to 368, further comprising an affinity tag.
[2728] Clause 370. The polypeptide according to clause 369, wherein the affinity tag is a poly-his tag, such as a hexa-his tag.
[2729] Clause 371. The polypeptide according to either clause 369 or 370, wherein the affinity tag is N-terminally located.
[2730] Clause 372. The polypeptide according to clause 371, comprising an amino acid sequence of SEQ ID No. 1177.
[2731] Clause 373. The polypeptide according to either clause 369 or 370, wherein the affinity tag is C-terminally located.
[2732] Clause 374. The polypeptide according to clause 373, comprising an amino acid sequence of SEQ ID No. 1178.
[2733] Clause 375. The polypeptide according to any one of clauses 260 to 374, comprising 1000 residues or fewer, especially 950 residues or fewer, in particular 900 residues or fewer, such as 850 residues or fewer.
[2734] Clause 376. An engineered rhamnosidase polypeptide comprising an amino acid sequence that is at least 80% identical to the amino acid sequence of SEQ ID No. 1017, or a functional fragment thereof, wherein the engineered rhamnosidase polypeptide includes at least one residue substitution from:
   [2735] (i) A56C
   [2736] (ii) A143P
   [2737] (iii) Q181H, Q181R or Q181S
   [2738] (v) G215S
   [2739] (vi) F216M
   [2740] (vii) G218D or G218N
   [2741] (viii) K219G
   [2742] (ix) A238M
   [2743] (x) T252Y
   [2744] (xi) T311W
   [2745] (xii) V326C
   [2746] (xiii) G357C
   [2747] (xiv) S369C, S369I, S369K or S369M
   [2748] (xv) I487M, I487Q or I487V
   [2749] (xvi) K492N
   [2750] (xvii) V499T
   [2751] (xviii) G508S
   [2752] (xix) R543C
   [2753] (xx) L557Y
   [2754] (xxi) G634A
   [2755] (xxii) S635N
   [2756] (xxiii) A690C and
   [2757] (xxiv) Q921H.
[2758] Clause 377. A polypeptide comprising an amino acid sequence of sequence of SEQ ID No. 1017 with one to twenty-four mutations selected from the list consisting of:
   [2759] (i) A56C
   [2760] (ii) A143P
   [2761] (iii) Q181H, Q181R or Q181S
   [2762] (iv) L214M
   [2763] (v) G215S
   [2764] (vi) F216M
   [2765] (vii) G218D or G218N
   [2766] (viii) K219G
   [2767] (ix) A238M
   [2768] (x) T252Y
   [2769] (xi) T311W
   [2770] (xii) V326C
   [2771] (xiii) G357C
   [2772] (xiv) S369C, S369I, S369K or S369M
   [2773] (xv) I487M, I487Q or I487V
   [2774] (xvi) K492N
   [2775] (xvii) V499T
   [2776] (xviii) G508S
   [2777] (xix) R543C
   [2778] (xx) L557Y
   [2779] (xxi) G634A
   [2780] (xxii) S635N
   [2781] (xxiii) A690C and
   [2782] (xxiv) Q921H.
[2783] Clause 378. The polypeptide according to either clause 376 or 377, having one of the substitutions.
[2784] Clause 379. The polypeptide according to either clause 376 or 377, having two of the substitutions.
[2785] Clause 380. The polypeptide according to either clause 376 or 377, having three of the substitutions.
[2786] Clause 381. The polypeptide according to either clause 376 or 377, having four of the substitutions.
[2787] Clause 382. The polypeptide according to either clause 376 or 377, having five of the substitutions.
[2788] Clause 383. The polypeptide according to either clause 376 or 377, having six of the substitutions.
[2789] Clause 384. The polypeptide according to either clause 376 or 377, having seven of the substitutions.
[2790] Clause 385. The polypeptide according to either clause 376 or 377, having eight of the substitutions.
[2791] Clause 386. The polypeptide according to either clause 376 or 377, having nine of the substitutions.
[2792] Clause 387. The polypeptide according to either clause 376 or 377, having ten of the substitutions.
[2793] Clause 388. The polypeptide according to either clause 376 or 377, having eleven of the substitutions.
[2794] Clause 389. The polypeptide according to either clause 376 or 377, having twelve of the substitutions.
[2795] Clause 390. The polypeptide according to either clause 376 or 377, having thirteen of the substitutions.
[2796] Clause 391. The polypeptide according to either clause 376 or 377, having fourteen of the substitutions.
[2797] Clause 392. The polypeptide according to either clause 376 or 377, having fifteen of the substitutions.
[2798] Clause 393. The polypeptide according to either clause 376 or 377, having sixteen of the substitutions.
[2799] Clause 394. The polypeptide according to either clause 376 or 377, having seventeen of the substitutions.
[2800] Clause 395. The polypeptide according to either clause 376 or 377, having eighteen of the substitutions.
[2801] Clause 396. The polypeptide according to either clause 376 or 377, having nineteen of the substitutions.
[2802] Clause 397. The polypeptide according to either clause 376 or 377, having twenty of the substitutions.
[2803] Clause 398. The polypeptide according to either clause 376 or 377, having twenty-one of the substitutions.
[2804] Clause 399. The polypeptide according to either clause 376 or 377, having twenty-two of the substitutions.
[2805] Clause 400. The polypeptide according to either clause 376 or 377, having twenty-three of the substitutions.
[2806] Clause 401. The polypeptide according to either clause 376 or 377, having twenty-four of the substitutions.
[2807] Clause 402. The polypeptide according to any one of clauses 376 to 401, comprising A56C.
[2808] Clause 403. The polypeptide according to any one of clauses 376 to 402, comprising A143P.
[2809] Clause 404. The polypeptide according to any one of clauses 376 to 403, comprising Q181H, Q181R or Q181S.
[2810] Clause 405. The polypeptide according to clause 404, comprising Q181H.
[2811] Clause 406. The polypeptide according to clause 404, comprising Q181R.
[2812] Clause 407. The polypeptide according to clause 404, comprising Q181S.
[2813] Clause 408. The polypeptide according to any one of clauses 376 to 407, comprising L214M.
[2814] Clause 409. The polypeptide according to any one of clauses 376 to 408, comprising G215S.
[2815] Clause 410. The polypeptide according to any one of clauses 376 to 409, comprising F216M.
[2816] Clause 411. The polypeptide according to any one of clauses 376 to 410, comprising G218D or G218N.
[2817] Clause 412. The polypeptide according to clause 411, comprising G218D.
[2818] Clause 413. The polypeptide according to clause 411, comprising G218N.
[2819] Clause 414. The polypeptide according to any one of clauses 376 to 413, comprising K219G.
[2820] Clause 415. The polypeptide according to any one of clauses 376 to 414, comprising A238M.
[2821] Clause 416. The polypeptide according to any one of clauses 376 to 415, comprising T252Y.
[2822] Clause 417. The polypeptide according to any one of clauses 376 to 416, comprising T311W.
[2823] Clause 418. The polypeptide according to any one of clauses 376 to 417, comprising V326C.
[2824] Clause 419. The polypeptide according to any one of clauses 376 to 418, comprising G357C.
[2825] Clause 420. The polypeptide according to any one of clauses 376 to 419, comprising S369C, S369I, S369K or S369M.
[2826] Clause 421. The polypeptide according to clause 420, comprising S369C.
[2827] Clause 422. The polypeptide according to clause 420, comprising S369I.
[2828] Clause 423. The polypeptide according to clause 420, comprising S369K.
[2829] Clause 424. The polypeptide according to clause 420, comprising S369M.
[2830] Clause 425. The polypeptide according to any one of clauses 376 to 424, comprising I487M, I487Q or I487V.
[2831] Clause 426. The polypeptide according to clause 424, comprising I487M.
[2832] Clause 427. The polypeptide according to clause 424, comprising I487Q.
[2833] Clause 428. The polypeptide according to clause 424, comprising I487V.
[2834] Clause 429. The polypeptide according to any one of clauses 376 to 428, comprising K492N.
[2835] Clause 430. The polypeptide according to any one of clauses 376 to 429, comprising V499T.
[2836] Clause 431. The polypeptide according to any one of clauses 376 to 430, comprising G508S.
[2837] Clause 432. The polypeptide according to any one of clauses 376 to 431, comprising R543C.
[2838] Clause 433. The polypeptide according to any one of clauses 376 to 432, comprising L557Y.
[2839] Clause 434. The polypeptide according to any one of clauses 376 to 433, comprising G634A.
[2840] Clause 435. The polypeptide according to any one of clauses 376 to 434, comprising S635N.
[2841] Clause 436. The polypeptide according to any one of clauses 376 to 435, comprising A690C.
[2842] Clause 437. The polypeptide according to any one of clauses 376 to 436, comprising Q921H.
[2843] Clause 438. The polypeptide according to either clause 376 or 377, comprising one mutation which is K219G.
[2844] Clause 439. The polypeptide according to either clause 376, 377 or 381 to 401, comprising A143P, L214M, K219G and Q921H.
[2845] Clause 440. The polypeptide according to clause 376, 377 or 382 to 401, comprising A143P, L214M, K219G, G357C and Q921H.
[2846] Clause 441. The polypeptide according to clause 376, 377 or 386 to 401, comprising A143P, L214M, G215S, G218N, K219G, G357C, G508S, G634A and Q921H.
[2847] Clause 442. The polypeptide according to clause 376 to 401, comprising at least one residue substitution from A143P, L214M, G215S, G218D, K219G, G357C, G508S, G634A, A690C and Q921H.
[2848] Clause 443. The polypeptide according to clause 442, comprising A143P, L214M, G215S, G218D, K219G, G357C, G508S, G634A, A690C and Q921H.
[2849] Clause 444. The polypeptide according to clause 376, 377 or 385 to 401 comprising A143P, L214M, G215S, K219G, G357C, G508S, G634A and Q921H and one to sixteen mutations selected from the list consisting of:
   [2850] (i) A56C
   [2851] (iii) Q181H, Q181R or Q181S
   [2852] (vi) F216M
   [2853] (vii) G218D or G218N
   [2854] (ix) A238M
   [2855] (x) T252Y
   [2856] (xi) T311W
   [2857] (xii) V326C
   [2858] (xiv) S369C, S369I, S369K or S369M
   [2859] (xv) I487M, I487Q or I487V
   [2860] (xvi) K492N
   [2861] (xvii) V499T
   [2862] (xix) R543C
   [2863] (xx) L557Y
   [2864] (xxii) S635N and
   [2865] (xxiii) A690C.
[2866] Clause 445. The polypeptide according to clause 444, comprising G218D or G218N.
[2867] Clause 446. The polypeptide according to any one of clauses 376 to 445 comprising an amino acid sequence that is at least 85% identical to the amino acid sequence of SEQ ID No. 1017.
[2868] Clause 447. The polypeptide according to any one of clauses 376 to 445 comprising an amino acid sequence that is at least 90% identical to the amino acid sequence of SEQ ID No. 1017.
[2869] Clause 448. The polypeptide according to any one of clauses 376 to 445 comprising an amino acid sequence that is at least 95% identical to the amino acid sequence of SEQ ID No. 1017.
[2870] Clause 449. The polypeptide according to any one of clauses 376 to 445 comprising an amino acid sequence that is at least 98% identical to the amino acid sequence of SEQ ID No. 1017.
[2871] Clause 450. The polypeptide according to any one of clauses 376 to 445, wherein the functional variant comprises a sequence having a fragment of at least 100, especially at least 200, particularly at least 300, such as at least 400, for example at least 500 contiguous amino acids of SEQ ID No. 1017.
[2872] Clause 451. The polypeptide according to clause 376, comprising the amino acid sequence of SEQ ID No. 1189.
[2873] Clause 452. The polypeptide according to clause 376, comprising the amino acid sequence of SEQ ID No. 1190.
[2874] Clause 453. The polypeptide according to clause 376, comprising the amino acid sequence of SEQ ID No. 1191.
[2875] Clause 454. The polypeptide according to clause 376, comprising the amino acid sequence of SEQ ID No. 1192.
[2876] Clause 455. The polypeptide according to clause 376, comprising the amino acid sequence of SEQ ID No. 1193.
[2877] Clause 456. The polypeptide according to any one of clauses 376 to 455, further comprising an affinity tag.
[2878] Clause 457. The polypeptide according to clause 456, wherein the affinity tag is a poly-his tag, such as a hexa-his tag.
[2879] Clause 458. The polypeptide according to either clause 456 or 457, wherein the affinity tag is N-terminally located.
[2880] Clause 459. The polypeptide according to clause 458, comprising an amino acid sequence of SEQ ID No. 1177.
[2881] Clause 460. The polypeptide according to either clause 456 or 457, wherein the affinity tag is C-terminally located.
[2882] Clause 461. The polypeptide according to clause 460, comprising an amino acid sequence of SEQ ID No. 1178.
[2883] Clause 462. The polypeptide according to any one of clauses 376 to 461, comprising 1100 residues or fewer, especially 1050 residues or fewer, in particular 1000 residues or fewer, such as 950 residues or fewer.
[2884] Clause 463. The polypeptide according to any one of clauses 376 to 462, consisting of an amino acid sequence of SEQ ID No. 1 with one to twenty-four mutations selected from the list consisting of: A56C
   [2885] (ii) A143P
   [2886] (iii) Q181H, Q181R or Q181S
   [2887] (iv) L214M
   [2888] (v) G215S
   [2889] (vi) F216M
   [2890] (vii) G218D or G218N
   [2891] (viii) K219G
   [2892] (ix) A238M
   [2893] (x) T252Y
   [2894] (xi) T311W
   [2895] (xii) V326C
   [2896] (xiii) G357C
   [2897] (xiv) S369C, S369I, S369K or S369M
   [2898] (xv) I487M, I487Q or I487V
   [2899] (xvi) K492N
   [2900] (xvii) V499T
   [2901] (xviii) G508S
   [2902] (xix) R543C
   [2903] (xx) L557Y
   [2904] (xxi) G634A
   [2905] (xxii) S635N
   [2906] (xxiii) A690C and
   [2907] (xxiv) Q921H.
[2908] Clause 464. A polynucleotide comprising a sequence encoding an engineered glucosidase or engineered rhamnosidase polypeptide according to any one of clauses 260 to 463.

[2909] The teaching of all references in the present application, including patent applications and granted patents, are herein fully incorporated by reference to the fullest extent possible. A composition or method or process defined as “comprising” certain elements is understood to encompass a composition, method or process (respectively) consisting of those elements. As used herein, ‘consisting essentially of’ means additional components may be present provided they do not alter the overall properties or function.

[2910] In respect of numerical values, the terms ‘approximately’, ‘around’ or ‘about’ will typically mean a value within plus or minus 10 percent of the stated value, especially within plus or minus 5 percent of the stated value and in particular the stated value.

[2911] Throughout the specification, including the claims, where the context permits, the term “comprising” and variants thereof such as “comprises” are to be interpreted as including the stated element (e.g., integer) or elements (e.g., integers) without necessarily excluding any other elements (e.g., integers). Thus a composition “comprising” X may consist exclusively of X or may include something additional e.g. X+Y.

[2912] The word “substantially” does not exclude “completely” e.g. a composition which is “substantially free” from Y may be completely free from Y. Where necessary, the word “substantially” may be omitted from the definition of the invention.

[2913] As used herein, the singular forms “a,” “an” and “the” include plural references unless the content clearly dictates otherwise.

[2914] As used herein, ng refers to nanograms, ug or μg refers to micrograms, mg refers to milligrams, mL or ml refers to milliliter, and mM refers to millimolar. Similar terms, such as um, are to be construed accordingly.

[2915] Unless specifically stated, a process comprising a step of mixing two or more components does not require any specific order of mixing. Thus components can be mixed in any order. Where there are three components then two components can be combined with each other, and then the combination may be combined with the third component, etc.

[2916] The invention will be further described by reference to the following, non-limiting, examples:

### EXAMPLES

### Example 1—HPLC of a Crude Aqueous Extract of Quillaja saponaria

[2917] Crude bark extract was separated by reverse phase HPLC using a C4 column and gradient elution: mobile phase A—water/acetonitrile, 7/3 v/v with 0.15% trifluoroacetic acid; mobile phase B—acetonitrile with 0.15% trifluoroacetic acid. UV detection was at 214 nm.

[2918] Crude bark extract samples are diluted as necessary with purified water. Polyvinylpolypyrrolidone (PVPP; 60 mg/mL) was added, the mixture stirred for approximately 30 minutes, and then centrifuged to separate the PVPP resin from the supernatant.

[2919] The supernatant was then analysed to provide an HPLC UV chromatogram.

[2920] FIG. 1 provides a representative example of an HPLC UV chromatogram. The peak corresponding to the QS-21 fraction is indicated.

### Example 2—Analytical Methods

### HPLC-UV

### Equipment

[2921] Waters Alliance 2690/2695 separations module
[2922] Waters 2487 UV Detector or 2996 PDA Detector
[2923] Vydac Protein C4 4.6×250 mm 5 um column
[2924] Mobile Phase A (MPA)—0.15% trifluoroacetic acid in water/acetonitrile (70:30 v/v)
[2925] Mobile Phase B (MPB)—0.15% trifluoroacetic acid in acetonitrile

TABLE 1
HPLC-UV Linear gradient conditions

| Time | Flow rate (ml/min) | % MPA | % MPB |
|---|---|---|---|
| 0 | 1 | 100 | 0 |
| 30 | 1 | 78.6 | 21.4 |
| 33 | 1 | 14.3 | 85.7 |

[2926] 40 ul of sample is injected. UV detection is set at 214 nM.

[2927] Using a blank injection for reference, integration of peaks in the chromatogram provides a total absorbance. Peak of interest (e.g. QS-21 main peak) is compared to total absorbance to determine peak content as a percentage.

[2928] The HPLC-UV method is also conveniently used to determine QS-21 main peak content and Preceding peak to QS-21 main peak ratio.

### UPLC-UV

### Equipment

[2929] Waters Acquity UPLC
[2930] Waters Acquity Tunable UV Detector
[2931] Waters Acquity BEH C18 2.1×100 mm 1.7 um column
[2932] Mobile Phase A (MPA)—0.025% acetic acid in water/acetonitrile (70:30 v/v)
[2933] Mobile Phase B (MPB)—0.025% trifluoroacetic acid in water/acetonitrile (30:70 v/v)

TABLE 2
UPLC-UV Linear gradient conditions

| Time | Flow rate (ml/min) | % MPA | % MPB |
|---|---|---|---|
| 0 | 0.5 | 88 | 12 |
| 10.2 | 0.5 | 65.7 | 34.3 |
| 11.2 | 0.5 | 10 | 90 |
| 13.2 | 0.5 | 10 | 90 |

[2934] Column temperature 28 degrees C. 10 ul of sample is injected. UV detection is set at 214 nM.

[2935] Using a blank injection for reference, integration of peaks in the chromatogram provides a total absorbance. Peak of interest (e.g. QS-21 main peak) is compared to total absorbance to determine peak content as a percentage.

[2936] The UPLC-UV method is also conveniently used to determine 2018/QS-21 Ratio.

### UPLC-UV/MS

### Equipment

[2937] Waters Acquity UPLC
[2938] Waters Acquity Tunable UV Detector
[2939] Waters Single-Quadrupole Mass Detector SQD1 (scanning range 1400 to 2040 M/Z)
[2940] Waters Acquity BEH C18 2.1×100 mm 1.7 um column
[2941] Mobile Phase A (MPA)—0.025% trifluoroacetic acid in water/acetonitrile/isopropyl alcohol (75:20:5 v/v)
[2942] Mobile Phase B (MPB)—0.025% trifluoroacetic acid in water/acetonitrile/isopropyl alcohol (10:72:18 v/v)

TABLE 3
UPLC-UV/MS Linear gradient conditions

| Time | Flow rate (ml/min) | % MPA | % MPB |
|---|---|---|---|
| 0 | 0.6 | 100 | 0 |
| 6.23 | 0.6 | 23 | 77 |

[2943] Test sample is prepared in 0.2% acetic acid in water/acetonitrile (70:30 v/v). Column temperature 55 degrees C. 10 ul of sample is injected. UV detection is set at 214 nM.

[2944] The term ‘QS-21 group’ is meant the triterpenoid glycosides identified from the B-isomer to the peak preceding the Iyo impurity in the UPLC-UV/MS methods described herein. Although retention times vary slightly between runs, the QS-21 group is located at approximately 3.8 min (QS-21 B-isomer) to approximately 4.5 minutes (prior to Iyo impurity peak, containing desarabinofuranosyl-QS-21 1856 A component).

[2945] Using a blank injection for reference, integration of peaks in the chromatogram that elute after the solvent front between 0.5 and around 5.50 minutes and do not appear in the blank is undertaken.

[2946] The monoisotope of the most abundant species is identified by combining TIC over the entire chromatogram to create a combined spectrum.

[2947] Ratio of QS-21 2002 A component to QS-21 1988 A component is calculated by comparing the ion current associated with the QS-21 2002 A component with the ion current associated with the QS-21 1988 A component within the QS-21 main peak.

[2948] FIG. 5 provides a chromatogram of an exemplary saponin extract. FIG. 6 shows expanded detail of the region including the QS-21 group and impurity peak.

[2949] FIGS. 7A and 7B provide extracted mass chromatograms for QS-21 1988 A (FIG. 7A) and QS-21 2002 A (FIG. 7B) molecular weight ions of an exemplary purified Quillaja saponaria saponin extract.

### Example 3—Purification of a Crude Aqueous Extract of Quillaja saponaria

[2950] Crude aqueous extract of Quillaja saponaria material having a 2018 component to QS-21 main peak ratio of 0.064 or lower and a Preceding peak to QS-21 main peak ratio of 0.4 or lower, was treated with PVPP (1 kg PVPP per litre of crude aqueous extract). After adsorption the mixture was filtered to separate the PVPP and bound impurities from the liquor.

[2951] FIG. 2 provides an example HPLC-UV chromatogram for crude aqueous extract of Quillaja saponaria (used for Preceding peak to QS-21 main peak ratio determination and QS-21 main peak content).

[2952] FIG. 3 provides an example UPLC-UV chromatogram for crude aqueous extract of Quillaja saponaria (used for 2018 component to QS-21 main peak ratio determination).

[2953] Filtered liquor was concentrated and further purified by ultrafiltration/diafiltration using water and a 30 kD Hellicon membrane.

[2954] Resulting permeate was purified by reverse phase chromatography using a polystyrene resin (Amberchrom XT20).

TABLE 4
Reverse phase chromatography polystyrene resin gradient conditions

| | | Initial | | Final | |
|---|---|---|---|---|---|
| | Duration | % Eluent | % Eluent | % Eluent | % Eluent |
| Step | (min) | A | B | A | B |
| Injection + Rinse | 11.3 | 100% | 0% | 100% | 0% |
| Gradient Elution 1 | 3.0 | 100% | 0% | 71% | 29% |
| Gradient Elution 2 | 50.0 | 71% | 29% | 53% | 47% |
| Gradient Elution 3 | 3.0 | 53% | 47% | 0% | 100% |
| Regeneration | 10 | 0% | 100% | 0% | 100% |
| Gradient | 3.0 | 0% | 100% | 100% | 0% |
| Equilibration | 13.0 | 100% | 0% | 100% | 0% |

[2955] Eluent A: 5% Acetonitrile and 0.25% acetic acid
[2956] Eluent B: 90% Acetonitrile and 0.25% acetic acid
[2957] Column: 30 cm ID, approximately 17.7 to 20.5 L volume
[2958] Loading: 50-110 g per injection

[2959] Fractions were pooled to provide polystyrene purified saponin extract with a composition:

% QS-21 main peak≥18% (by HPLC)

and

2018 component/QS-21 main peak ratio≤0.054 (by UPLC-UV).

[2960] FIG. 4 provides an example UPLC-UV chromatogram for a polystyrene purified saponin extract pool.

[2961] The combined polystyrene purified fraction pool was further purified by reverse phase chromatography using a phenyl resin (EPDM).

TABLE 5
Reverse phase chromatography phenyl resin gradient conditions

| | Duration | | |
|---|---|---|---|
| Step | (min) | % Eluent C | % Eluent B |
| Injection + Rinse | 2.0 | 100% | 0% |
| Isocratic Elution | 58.0 | 100% | 0% |
| Regeneration | 5.0 | 0% | 100% |
| Equilibration | 10.0 | 100% | 0% |

[2962] Eluent B: 90% Acetonitrile and 0.25% acetic acid
[2963] Eluent C: 35.2% acetonitrile and 0.25% acetic acid
[2964] Column: 45 cm ID, approximately 39.8 to 42.9 L volume
[2965] Loading: 13-21 g per injection

[2966] QS-21 containing fractions were pooled to provide phenyl purified saponin extract with a composition:

% QS-21 group≥98.5%

QS-21 main peak≥94.5%

2018 component≤2.7%

Main peak outside of the QS-21 group≤1% (by UPLC-UV/MS).

[2967] The combined phenyl purified saponin extract was concentrated by capture and release with reverse phase chromatography using a C8 resin (Lichroprep RP8) and the following conditions:
[2968] Loaded to column conditioned at 24% acetonitrile and 0.20% acetic acid.
[2969] Eluted with 60% acetonitrile and 0.20% acetic acid.
[2970] 11 cm column, approximately 0.87 to 0.97 L volume
[2971] Load: 50-142 g per injection

[2972] The C8 concentrated saponin extract was subjected to solvent exchange using ultrafiltration/diafiltration and a Pellicon 1 kDa membrane to reduce acetonitrile content below 21%.

[2973] The resulting solvent exchanged saponin extract was then lyophilised in a single step to provide a final purified saponin extract product.

[2974] The use of the process as described in Example 3 can consistently provide a purified saponin extract of Quillaja saponaria having a defined content in terms of QS-21 main peak and 2018 component, presenting a chromatographic profile comparable to the chromatograms shown in FIGS. 5 to 9.

### Example 4—Screening of Glucosidases for Deglucosylation of QS-18 to QS-21

### Method

### Enzyme Selection

[2975] The enzyme family of hydrolases (E.C.3.2.1.-) that act on glycosidic bonds (‘glycoside hydrolases’ (GH) or ‘glycosidases’), contains at present approximately one million members having wide ranging activities across molecules containing glycans and polysaccharides. A typical QS-18 family molecule contains a number of such glycosidic bonds, with the presence of the 1-3 bond between the alpha-L-rhamnose on the linear tetrasaccharide and the branched terminal beta-D-glucose differentiating the QS-18 family from the QS-21 family. The specific hydrolysis of this bond by a beta-glucosidase, i.e. an enzyme with exo-beta-1,3-glucosidase activity (E.C. 3.2.1.21 and E.C. 3.2.1.58) will therefore convert QS-18 family components to QS-21 family components. Specific members of the glycoside hydrolase family having exo-beta-1,3-glucosidase activity were initially identified using the CAZy (Carbohydrate Active enZyme) database (www.cazy.com), with GH families 1, 3 and 5 purported to have enzyme members with the desired exo-beta-1,3 activity. All sequences annotated by CAZy from GH families 1,3 and 5 were obtained, and separate curated hidden Markov model profiles constructed for each which were then used to identify additional familial enzymes by searching the 209 million protein member Uniprot (www.uniprot.org) knowledgebase with the software HMMER (Eddy, 1998). In total, 22,594 sequences: 12,049, 9,278 and 1,267 representatives from GH families 1,3 and 5, respectively, were identified using this method. MMSeqs2 (Hauser, 2016) was then used to cluster each group of enzyme sequences using the default clustering workflow and parameters with a minimum sequence identity and coverage of 30% and 80%, respectively. In cases where the initial clustering yielded clusters with more than 1000 members, a second sub-clustering was performed at a higher 50% or 70% identity to ensure diverse exemplars from these larger clusters were represented more prominently. All clusters were then examined, and exemplars selected from each with preferences for annotation quality, known experimental activity, existing three dimensional structures from the Protein Data Bank (www.wwpdb.org) or known extremophile organisms as annotated by Uniprot. A final set of 400 diverse candidate enzymes was selected. Polynucleotide sequences encoding each selected enzyme linked to an N-terminal 6×His tag and Tev-cleavage site were prepared (amino acid sequence for His-tag linker, inserted N-terminally of normal start methionine, is provided in SEQ ID No. 1177) using a proprietary genetic-algorithm based codon optimization code.

[2976] Details of the candidate enzyme and polynucleotide sequences are summarised below in Table 6.

TABLE 6
Glucosidase candidate sequences

| | | | AA | DNA |
|---|---|---|---|---|
| UniParc Ref @1 | Uniprot ref | Organism | Seq ID | Seq ID |
| UPI00049B1A8C | A0A061B3J2 | Cyberlindnera fabianii | 1 | 401 |
| UPI0004E3EF7B | A0A085EII0 | Flavobacterium gilvum | 2 | 402 |
| UPI00050EE490 | A0A090X649 | Algibacter lectus | 3 | 403 |
| UPI0005ECB51E | A0A0F0LB94 | Microbacterium azadirachtae | 4 | 404 |
| UPI0006588DAD | A0A0J0UT37 | Actinobacteria bacterium | 5 | 405 |
| UPI0007968552 | A0A136KWB3 | Chloroflexi bacterium | 6 | 406 |
| UPI0002080410 | A0A181C809 | Komagataeibacter rhaeticus | 7 | 407 |
| UPI0008211BFC | A0A1C5WEL8 | Bacteroides sp. | 8 | 408 |
| UPI00085A2BD0 | A0A1D8FZW3 | Streptomyces rubrolavendulae | 9 | 409 |
| UPI00098C60F6 | A0A1S8KYM5 | Clostridium roseum | 10 | 410 |
| UPI0009CE0D4C | A0A1V5M6V6 | uncultured bacterium | 11 | 411 |
| UPI0009D4127D | A0A1V6AN95 | Firmicutes bacterium | 12 | 412 |
| UPI00045601AB | A0A061H1Z3 | Anthracocystis flocculosa | 13 | 413 |
| UPI0004FF77C7 | A0A086ZKU2 | Bifidobacterium boum | 14 | 414 |
| UPI00051EDBDE | A0A098LTR2 | Jejuia pallidilutea | 15 | 415 |
| UPI00062105AB | A0A0F8B2B0 | Ceratocystis fimbriata | 16 | 416 |
| UPI0006583AB1 | A0A0J0UVW7 | Actinobacteria bacterium | 17 | 417 |
| UPI0007AABFAD | A0A143QAX3 | Rhodococcus sp. | 18 | 418 |
| UPI0007F2D02D | A0A194VF47 | Valsa mali | 19 | 419 |
| UPI000821004D | A0A1C5WSI4 | uncultured Bacteroides sp. | 20 | 420 |
| UPI00084089B2 | A0A1E3ALT2 | Eisenbergiella tayi | 21 | 421 |
| UPI000978E914 | A0A1V2MY14 | Streptomyces sp. | 22 | 422 |
| UPI0009CBF21C | A0A1V5MH90 | Firmicutes bacterium | 23 | 423 |
| UPI0009D5B1F0 | A0A1V6BAK3 | Tenericutes bacterium | 24 | 424 |
| UPI0004A87350 | A0A067Z479 | Gluconobacter oxydans | 25 | 425 |
| UPI00050787A2 | A0A087B8Q8 | Bifidobacterium catenulatum | 26 | 426 |
| UPI0005965863 | A0A0B7K538 | Bionectria ochroleuca | 27 | 427 |
| UPI0006377CA4 | A0A0G0GD78 | Parcubacteria sp. | 28 | 428 |
| UPI0006228575 | A0A0M2H276 | Microbacterium ketosireducens | 29 | 429 |
| UPI0006C454B4 | A0A173R3W4 | Roseburia faecis | 30 | 430 |
| UPI0007F1D695 | A0A1A6A050 | Kwoniella dejecticola | 31 | 431 |
| UPI0008232A70 | A0A1C6C862 | uncultured Clostridium sp. | 32 | 432 |
| UPI000866CB30 | A0A1E4S2F8 | Cyberlindnera jadinii | 33 | 433 |
| UPI0009D3483D | A0A1V5G4W6 | Bacteroidetes bacterium | 34 | 434 |
| UPI0009CC9AEA | A0A1V5Q4R4 | Verrucomicrobia bacterium | 35 | 435 |
| UPI0009C6DE73 | A0A1V6BV25 | Bacteroidetes bacterium | 36 | 436 |
| UPI0004E051A9 | A0A077WUK7 | Lichtheimia ramosa | 37 | 437 |
| UPI0005060F52 | A0A087BWT7 | Bifidobacterium mongoliense | 38 | 438 |
| UPI000591CED9 | A0A0B8NZY1 | Vibrio ishigakensis | 39 | 439 |
| UPI00063B706F | A0A0G2HEV5 | Phaeomoniella chlamydospora | 40 | 440 |
| UPI0006C04F59 | A0A0M8K5H7 | Ardenticatena maritima | 41 | 441 |
| UPI000197E031 | A0A173WPC4 | Coprococcus comes | 42 | 442 |
| UPI0007DDBAB3 | A0A1A9GNJ0 | Nocardioides dokdonensis | 43 | 443 |
| UPI000822F7EB | A0A1C6EBC1 | uncultured Clostridium sp. | 44 | 444 |
| UPI000878EB40 | A0A1F2PFB4 | Acetobacterium wieringae | 45 | 445 |
| UPI0009D0A2C1 | A0A1V5HNJ3 | Tenericutes bacterium | 46 | 446 |
| UPI0009CB8A73 | A0A1V5UFI1 | Tenericutes bacterium | 47 | 447 |
| UPI0009CC90AF | A0A1V6CDT2 | uncultured bacterium | 48 | 448 |
| UPI0004D8E473 | A0A078SYD0 | Parabacteroides distasonis | 49 | 449 |
| UPI0005006C6A | A0A087CJB0 | Bifidobacterium psychraerophilum | 50 | 450 |
| UPI00059A3BA8 | A0A0C2YJF2 | Hebeloma cylindrosporum | 51 | 451 |
| UPI0006579FEA | A0A0G4JRR8 | Brenneria goodwinii | 52 | 452 |
| UPI00073C9E60 | A0A0U5GN20 | Aspergillus calidoustus | 53 | 453 |
| UPI0006C6E0C3 | A0A174BEZ2 | Bacteroides finegoldii | 54 | 454 |
| UPI0008153D6D | A0A1B2A943 | Altererythrobacter dongtanensis | 55 | 455 |
| UPI0008206E7B | A0A1C6FWD9 | uncultured Anaerotruncus sp. | 56 | 456 |
| UPI0008AC0E17 | A0A1F5UJR6 | Candidatus firestone | 57 | 457 |
| UPI0009C6C8E4 | A0A1V5HS22 | Tenericutes bacterium | 58 | 458 |
| UPI0009CEE1AB | A0A1V5VBL2 | Lentisphaerae bacterium | 59 | 459 |
| UPI0009CAAB0A | A0A1V6FZ47 | Planctomycetes bacterium | 60 | 460 |
| UPI0004DD62AC | A0A084G332 | Pseudallescheria apiosperma | 61 | 46 |
| UPI000507F00A | A0A090Q4N8 | Nonlabens sediminis | 62 | 462 |
| UPI0005CC42CA | A0A0C5VDU3 | Gynuella sunshinyii | 63 | 463 |
| UPI00063E4005 | A0A0G4N9Q7 | Verticillium longisporum | 64 | 464 |
| UPI00073C6CD3 | A0A0V8TAB5 | Cellulomonas sp. | 65 | 465 |
| UPI0006C024BB | A0A174FBX7 | Hungatella hathewayi | 66 | 466 |
| UPI000688E74D | A0A1C2DG64 | Mesorhizobium sp. | 67 | 467 |
| UPI000822FAB7 | A0A1C6GRT5 | Clostridium sp. | 68 | 468 |
| UPI0009284E74 | A0A1M3CSY6 | Chlamydiales bacterium | 69 | 469 |
| UPI0009CB461D | A0A1V5HUX3 | Spirochaetes bacterium | 70 | 470 |
| UPI0009C92D6A | A0A1V5VHB9 | bacterium | 71 | 471 |
| UPI0009D12B86 | A0A1V6H2W5 | Thermotogae bacterium | 72 | 472 |
| UPI0004DCBED3 | A0A084GGE2 | Pseudallescheria apiosperma | 73 | 473 |
| UPI00050E0BE3 | A0A090VF17 | Algibacter lectus | 74 | 474 |
| UPI0005B075C8 | A0A0C9TWP5 | Paxillus involutus | 75 | 475 |
| UPI00063DF006 | A0A0G4NA55 | Verticillium longisporum | 76 | 476 |
| UPI00076F8EA4 | A0A110B1H1 | Mucilaginibacter gotjawali | 77 | 477 |
| UPI0006C0FFEF | A0A174IWW4 | Bacteroides uniformis | 78 | 478 |
| UPI0008222B77 | A0A1C5W0N6 | Coprococcus sp. | 79 | 479 |
| UPI0006C36823 | A0A1C6K2X5 | Blautia sp. | 80 | 480 |
| UPI00092B3CD4 | A0A1M3ELH4 | Cellulomonas sp. | 81 | 481 |
| UPI0009C85428 | A0A1V5J984 | bacterium | 82 | 482 |
| UPI0009CA1D5C | A0A1V5WHQ7 | Spirochaetes bacterium | 83 | 483 |
| UPI0009C7041F | A0A1V6IJ57 | Tenericutes bacterium | 84 | 484 |
| UPI0004E2A41F | A0A085EG29 | Flavobacterium gilvum | 85 | 485 |
| UPI0005102470 | A0A090WWZ1 | Algibacter lectus | 86 | 486 |
| UPI0005B0F0AE | A0A0C9WDY0 | Hydnomerulius pinastri | 87 | 487 |
| UPI00065C2666 | A0A0H5NWN2 | Nocardia farcinica | 88 | 488 |
| UPI000760375B | A0A125MG18 | Bacteroides cellulosilyticus | 89 | 489 |
| UPI0007DF4250 | A0A178ZBN2 | Fonsecaea erecta | 90 | 490 |
| UPI0008209852 | A0A1C5W9N9 | Bacteroides sp. | 91 | 491 |
| UPI00086C34C1 | A0A1D3UGH8 | Tannerella forsythia | 92 | 492 |
| UPI00097E83BB | A0A1R4KI92 | Microbacterium esteraromaticum | 93 | 493 |
| UPI0009D255E5 | A0A1V5LJK9 | bacterium | 94 | 494 |
| UPI0009C5A3CF | A0A1V5Z2L2 | Candidatus hydrogenedentes | 95 | 495 |
| UPI0009C55799 | A0A1V6J4J8 | Bacteroidetes bacterium | 96 | 496 |
| UPI0009D4067F | A0A1V6RQ41 | Penicillium solitum | 97 | 497 |
| UPI0008737AA2 | A0A288Q812 | Weissella soli | 98 | 498 |
| UPI000CAC57D4 | A0A2K4ZN91 | Acetatifactor muris | 99 | 499 |
| UPI000D237A4A | A0A2T2NYD4 | Corynespora cassiicola | 100 | 500 |
| UPI000D77C91D | A0A316V6M3 | Meira miltonrushii | 101 | 501 |
| UPI00004E1F76 | A0A380YVC7 | Bacteroides fragilis | 102 | 502 |
| UPI000F0C30E8 | A0A3G2SB79 | Malassezia restricta | 103 | 503 |
| UPI000FFFEFB2 | A0A430LYA2 | Fusarium euwallaceae | 104 | 504 |
| UPI0010251887 | A0A4Q2E070 | Psathyrella aberdarensis | 105 | 505 |
| UPI0000E69509 | A0KLP6 | Aeromonas hydrophila | 106 | 506 |
| UPI00000B86CB | A4F7P9 | Saccharopolyspora erythraea | 107 | 507 |
| UPI000180240E | B5I181 | Streptomyces sviceus | 108 | 508 |
| UPI000A250F78 | A0A1Y2AWB7 | Naematelia encephala | 109 | 509 |
| UPI000C0221F1 | A0A2C9D612 | Hartmannibacter diazotrophicus | 110 | 510 |
| UPI000CEB5AB1 | A0A2L2BPE2 | Pontimonas salivibrio | 111 | 511 |
| UPI000D5B9C38 | A0A2V1CH24 | Cadophora sp. | 112 | 512 |
| UPI000D779558 | A0A316V8S0 | Meira miltonrushii | 113 | 513 |
| UPI000DC42E3D | A0A395IJW4 | Monilinia fructigena | 114 | 514 |
| UPI000F3E476C | A0A3M6XGS0 | Hortaea werneckii | 115 | 515 |
| UPI00101460D7 | A0A445N7U0 | Streptomyces netropsis | 116 | 516 |
| UPI001139C6A8 | A0A4S9IFI0 | Aureobasidium pullulans | 117 | 517 |
| UPI0000EA5CFF | A1CTN9 | Aspergillus clavatus | 118 | 518 |
| UPI0001523037 | A5CT94 | Clavibacter michiganensis | 119 | 519 |
| UPI0001831CF5 | B6H7R5 | Penicillium rubens | 120 | 520 |
| UPI000B365547 | A0A1Y4NTL9 | Lachnoclostridium sp. | 121 | 521 |
| UPI000C09BF88 | A0A2D5IXB9 | Rhodobacteraceae bacterium | 122 | 522 |
| UPI0004B5EEF2 | A0A2M9UUC4 | Bacteroides fragilis | 123 | 523 |
| UPI000D7FE1ED | A0A2V5IY78 | Aspergillus indologenus | 124 | 524 |
| UPI000D802B25 | A0A316YR39 | Acaromyces ingoldii | 125 | 525 |
| UPI000DC60823 | A0A395J1U5 | Monilinia fructigena | 126 | 526 |
| UPI000F52D773 | A0A3N6CA02 | Paenibacillus xylanexedens | 127 | 527 |
| UPI000F6DAAAE | A0A448HIG0 | Actinomyces howellii | 128 | 528 |
| UPI00113D19DF | A0A4V5N914 | Friedmanniomyces endolithicus | 129 | 529 |
| UPI0000EA8672 | A1DNS0 | Neosartorya fischeri | 130 | 530 |
| UPI0000D7314B | A6V4K6 | Pseudomonas aeruginosa | 131 | 531 |
| UPI00018E7266 | B8MF24 | Talaromyces stipitatus | 132 | 532 |
| UPI000A1A5FD7 | A0A1Y5RVF8 | Aquimixticola soesokkakensis | 133 | 533 |
| UPI000C98D37C | A0A2D9YGV1 | Rhodobacterales bacterium | 134 | 534 |
| UPI0006F9793E | A0A2N9AS40 | Methylorubrum extorquens | 135 | 535 |
| UPI00000CF7C8 | A0A2X2YBP0 | Clostridium perfringens | 136 | 536 |
| UPI0008AEBEA3 | A0A348NID6 | Acholeplasmatales bacterium | 137 | 537 |
| UPI000EC3C979 | A0A3B8VHE8 | Bacteroidetes bacterium | 138 | 538 |
| UPI000F637E38 | A0A3P6K8E8 | Clostridium carnis | 139 | 539 |
| UPI000B93B5C9 | A0A448HNB5 | Mycolicibacterium flavescens | 140 | 540 |
| UPI000F6EFA71 | A0A4V6LJ94 | Streptococcus gallolyticus | 141 | 541 |
| UPI0000EB54CC | A1JNB7 | Yersinia enterocolitica | 142 | 542 |
| UPI0000ED8A80 | A7HFG4 | Anaeromyxobacter sp. | 143 | 543 |
| UPI00018E7D70 | B8MK55 | Talaromyces stipitatus | 144 | 544 |
| UPI000A2E3FAA | A0A1Z5SL14 | Hortaea werneckii | 145 | 545 |
| UPI000C529025 | A0A2E2Q8X2 | Micavibrio sp. | 146 | 546 |
| UPI000CE6B996 | A0A2N9MBS0 | Acidobacteriia bacterium | 147 | 547 |
| UPI000DA3A972 | A0A2X4T570 | Corynebacterium jeikeium | 148 | 548 |
| UPI000E8D37A1 | A0A353PZH8 | Clostridiaceae bacterium | 149 | 549 |
| UPI000748C096 | A0A3B9PA35 | Anaerolineaceae bacterium | 150 | 550 |
| UPI000FF41956 | A0A409WSY0 | Gymnopilus dilepis | 151 | 551 |
| UPI000F7105D4 | A0A448R8N0 | Kocuria rosea | 152 | 552 |
| UPI0011696FAB | A0A509DWZ3 | Teredinibacter sp. | 153 | 553 |
| UPI0000EFB564 | A2QS42 | Aspergillus niger | 154 | 554 |
| UPI000164423D | B0D734 | Laccaria bicolor | 155 | 555 |
| UPI00017357F6 | B9XH33 | Pedosphaera parvula | 156 | 556 |
| UPI00042469F6 | A0A239TGH2 | Megamonas hypermegale | 157 | 557 |
| UPI000BC209C3 | A0A2H3E300 | Armillaria gallica | 158 | 558 |
| UPI000D2EAE87 | A0A2P8AV03 | Micromonospora sp. | 159 | 559 |
| UPI000DA286EE | A0A2X5CJC5 | Klebsiella oxytoca | 160 | 560 |
| UPI000DFAEF6C | A0A367ZIH8 | Candidatus ozemobacter | 161 | 561 |
| UPI000E399EE8 | A0A3D8R2C2 | Coleophoma crateriformis | 162 | 562 |
| UPI000FBC01E3 | A0A427XHS2 | Apiotrichum porosum | 163 | 563 |
| UPI00068E4E50 | A0A449BJ27 | Acholeplasma hippikon | 164 | 564 |
| UPI001185F074 | A0A516RGT1 | Streptomyces spectabilis | 165 | 565 |
| UPI0000EFCED2 | A2R8G2 | Aspergillus niger | 166 | 566 |
| UPI00000D8BFA | B0RYA0 | Xanthomonas campestris | 167 | 567 |
| UPI00019C9CD7 | C2FDL2 | Lactobacillus paracasei | 168 | 568 |
| UPI000BC490A3 | A0A261XUH4 | Bifiguratus adelaidae | 169 | 569 |
| UPI000CC31AE2 | A0A2H5YYA1 | bacterium | 170 | 570 |
| UPI000D26C9C6 | A0A2P9IY35 | Actinomadura parvosata | 171 | 571 |
| UPI00024F22B8 | A0A2Z5Y4P3 | Melissococcus plutonius | 172 | 572 |
| UPI000E020871 | A0A377KJS3 | Enterococcus durans | 173 | 573 |
| UPI000DD17A7D | A0A3G2S2J6 | Malassezia restricta | 174 | 574 |
| UPI000FA2DE87 | A0A427XZQ0 | Apiotrichum porosum | 175 | 575 |
| UPI0010355193 | A0A4P6PWP5 | Streptomonospora sp. | 176 | 576 |
| UPI00119640A1 | A0A558LH47 | Lactobacillus gasseri | 177 | 577 |
| UPI0000EFD0AA | A2RAJ1 | Aspergillus niger | 178 | 578 |
| UPI000170BF91 | B0XXG1 | Neosartorya fumigata | 179 | 579 |
| UPI0001A5B234 | C4Z6T5 | Eubacterium eligens | 180 | 580 |
| UPI000BC64A75 | A0A261XVM8 | Bifiguratus adelaidae | 181 | 581 |
| UPI000CAA854E | A0A2H6EX57 | bacterium | 182 | 582 |
| UPI000D24EC2C | A0A2T2N5H9 | Corynespora cassiicola | 183 | 583 |
| UPI000D77A0B7 | A0A316UK83 | Pseudomicrostroma glucosiphilum | 184 | 584 |
| UPI0002DAAFCC | A0A380HD31 | Staphylococcus saprophyticus | 185 | 585 |
| UPI000F0C6B8E | A0A3G2S932 | Malassezia restricta | 186 | 586 |
| UPI000FBA70E2 | A0A427YCL1 | Saitozyma podzolica | 187 | 587 |
| UPI00102822B4 | A0A4Q1BRC6 | Tremella mesenterica | 188 | 588 |
| UPI0000527506 | A0JZ86 | Arthrobacter sp. | 189 | 589 |
| UPI000157388C | A3LRB0 | Scheffersomyces stipitis | 190 | 590 |
| UPI0001712E02 | B1XZK8 | Leptothrix cholodnii | 191 | 591 |
| UPI000166883C | C4ZLL7 | Thauera sp. | 192 | 592 |
| UPI00018494AB | C5CDW5 | Kosmotoga olearia | 193 | 593 |
| UPI0001CD671F | D4L3Y2 | Roseburia intestinalis | 194 | 594 |
| UPI0001E0DC00 | E0PDF8 | Streptococcus equinus | 195 | 595 |
| UPI0001F80C4B | E8JUK5 | Streptococcus cristatus | 196 | 596 |
| UPI0001D2DBBC | F2JLH3 | Cellulosilyticum lentocellum | 197 | 597 |
| UPI0001C48657 | F5WY15 | Streptococcus gallolyticus | 198 | 598 |
| UPI00021D443A | F9Y8Z7 | Ketogulonicigenium vulgare | 199 | 599 |
| UPI000228255D | G3AGX1 | Spathaspora passalidarum | 200 | 600 |
| UPI00023F6F5F | G8T9J3 | Niastella koreensis | 201 | 601 |
| UPI000260108C | I3IDC0 | Cellvibrio sp. | 202 | 602 |
| UPI000272D1E0 | J1ACAb | Flavobacterium sp. | 203 | 603 |
| UPI00028E7FE1 | K2S5D3 | Macrophomina phaseolina | 204 | 604 |
| UPI00018483A2 | C5CHI5 | Kosmotoga olearia | 205 | 605 |
| UPI0001CD5918 | D4LRF6 | Blautia obeum | 206 | 606 |
| UPI0001E18CDA | E0Q541 | Bifidobacterium dentium | 207 | 607 |
| UPI0001F55F8F | E8N5R8 | Anaerolinea thermophila | 208 | 608 |
| UPI0002050DA2 | F2N7E4 | Coriobacterium glomerans | 209 | 609 |
| UPI000210C886 | F5XJQ3 | Microlunatus phosphovorus | 210 | 610 |
| UPI0001C18877 | G0Q1U8 | Streptomyces sp. | 211 | 611 |
| UPI0002282B61 | G3AIV6 | Spathaspora passalidarum | 212 | 612 |
| UPI0002402F4A | H0ET34 | Glarea lozoyensis | 213 | 613 |
| UPI0002633B36 | I3UJK0 | Glaciozyma antarctica | 214 | 614 |
| UPI00027DFD35 | J7LN00 | Arthrobacter sp. | 215 | 615 |
| UPI00028D698C | K3VMA9 | Fusarium pseudograminearum | 216 | 616 |
| UPI000006AA61 | C6GGC9 | Hypocrea rufa | 217 | 617 |
| UPI0001CDA964 | D4M6W6 | Ruminococcus torques | 218 | 618 |
| UPI0001E17370 | E0Q9Z7 | Bifidobacterium dentium | 219 | 619 |
| UPI0001FC71F6 | F0R2D7 | Bacteroides salanitronis | 220 | 620 |
| UPI00020E6D19 | F3ZQ40 | Bacteroides coprosuis | 221 | 621 |
| UPI00020D4CC6 | F6CWF6 | Marinomonas posidonica | 222 | 622 |
| UPI000227E8ED | G0SE64 | Chaetomium thermophilum | 223 | 623 |
| UPI00022B9A15 | G4L5K1 | Tetragenococcus halophilus | 224 | 624 |
| UPI00024F0867 | H6CCZ8 | Paenibacillus sp. | 225 | 625 |
| UPI000265AA4B | I4B8U7 | Turneriella parva | 226 | 626 |
| UPI00027DFDB2 | J7LQK9 | Arthrobacter sp. | 227 | 627 |
| UPI00029074B1 | K5W7V1 | Agaricus bisporus | 228 | 628 |
| UPI0001B67634 | C7YIP3 | Nectria haematococca | 229 | 629 |
| UPI0001A25287 | D4VSZ0 | Bacteroides xylanisolvens | 230 | 630 |
| UPI0001DD9790 | E1R331 | Sediminispirochaeta smaragdinae | 231 | 631 |
| UPI0001FC42E9 | F0RPV2 | Deinococcus proteolyticus | 232 | 632 |
| UPI0002033A0A | F4C226 | Sphingobacterium sp. | 233 | 633 |
| UPI0001E54133 | F6ET40 | Sphingobium chlorophenolicum | 234 | 634 |
| UPI00021CACC4 | G0V3V5 | Caloramator australicus | 235 | 635 |
| UPI000230E3BF | G6F370 | Commensalibacter intestini | 236 | 636 |
| UPI00024F07AC | H6CIT2 | Paenibacillus sp. | 237 | 637 |
| UPI0002638AF3 | I4EIA9 | Nitrolancea hollandica | 238 | 638 |
| UPI000392C3ED | J9VVK7 | Cryptococcus neoformans | 239 | 639 |
| UPI0002988588 | K7S596 | Acidipropionibacterium acidipropionici | 240 | 640 |
| UPI0001B93465 | C9PT75 | Prevotella sp. | 241 | 641 |
| UPI0001D08095 | D5ALU0 | Rhodobacter capsulatus | 242 | 642 |
| UPI0001E74370 | E3FJ05 | Stigmatella aurantiaca | 243 | 643 |
| UPI0002010060 | F0RVK3 | Sphaerochaeta globosa | 244 | 644 |
| UPI000207D78C | F4GH96 | Sphaerochaeta coccoides | 245 | 645 |
| UPI00020EFBCB | F6ICQ5 | Novosphingobium sp. | 246 | 646 |
| UPI000225331F | G1XH86 | Arthrobotrys oligospora | 247 | 647 |
| UPI00000C6907 | G6FFS4 | Lactococcus lactis | 248 | 648 |
| UPI000255313A | H8FXH7 | Phaeospirillum molischianum | 249 | 649 |
| UPI0002609C68 | I4EW72 | Modestobacter marinus | 250 | 650 |
| UPI00028AC337 | K0K125 | Saccharothrix espanaensis | 251 | 651 |
| UPI00029BA293 | K8DAK0 | Cronobacter sakazakii | 252 | 652 |
| UPI0001BBDF1E | C9SVX1 | Verticillium alfalfae | 253 | 653 |
| UPI0001CCFD36 | D6CY10 | Bacteroides xylanisolvens | 254 | 654 |
| UPI0001EBD98A | E4RUR0 | Leadbetterella byssophila | 255 | 655 |
| UPI00020102A5 | F0RYB6 | Sphaerochaeta globosa | 256 | 656 |
| UPI000207D6A0 | F4GLH6 | Sphaerochaeta coccoides | 257 | 657 |
| UPI000212252C | F7Q0Y2 | Haloplasma contractile | 258 | 658 |
| UPI0002265447 | G1Y4C7 | Nitrospirillum amazonense | 259 | 659 |
| UPI00023420B8 | G8AWD9 | Azospirillum brasilense | 260 | 660 |
| UPI000255314F | H8FXJ8 | Phaeospirillum molischianum | 261 | 661 |
| UPI000260A2FA | I4EYD5 | Modestobacter marinus | 262 | 662 |
| UPI000283EB8D | K0KVJ2 | Wickerhamomyces ciferrii | 263 | 663 |
| UPI0002A5D085 | K9XKL8 | Gloeocapsa sp. | 264 | 664 |
| UPI0001A3BCB6 | D1C7U8 | Sphaerobacter thermophilus | 265 | 665 |
| UPI0001CCEF1F | D6D4V2 | Bacteroides xylanisolvens | 266 | 666 |
| UPI0001F149E8 | E6K4W5 | Prevotella buccae | 267 | 667 |
| UPI0001FF1101 | F0XBR0 | Grosmannia clavigera | 268 | 668 |
| UPI00020F9774 | F4R4W2 | Melampsora larici-populina | 269 | 669 |
| UPI0002138E9C | F8N7G1 | Prevotella multisaccharivorax | 270 | 670 |
| UPI0002255A63 | G2G8K4 | Streptomyces zinciresistens | 271 | 671 |
| UPI0001D9FC40 | G8NY42 | Granulicella mallensis | 272 | 672 |
| UPI00021F1FEE | I1RH94 | Gibberella zeae | 273 | 673 |
| UPI00026090A2 | I4EYK6 | Modestobacter marinus | 274 | 674 |
| UPI0002869F55 | K0NRS8 | Lactobacillus equicursoris | 275 | 675 |
| UPI0002A93280 | L2F9W0 | Colletotrichum fructicola | 276 | 676 |
| UPI0001BF8AF6 | D2B261 | Streptosporangium roseum | 277 | 677 |
| UPI00019F252A | D7UX19 | Listeria grayi | 278 | 678 |
| UPI0001F11EFF | E6LF07 | Enterococcus italicus | 279 | 679 |
| UPI000203D9EA | F2IIT6 | Fluviicola taffensis | 280 | 680 |
| UPI00020CA641 | F5N4W9 | Shigella flexneri | 281 | 681 |
| UPI0002189080 | F9EFW5 | Actinomyces sp. | 282 | 682 |
| UPI00022EBE5A | G2X5V6 | Verticillium dahliae | 283 | 683 |
| UPI00023ED5A8 | G8S0M0 | Actinoplanes sp. | 284 | 684 |
| UPI000023EA29 | I1S320 | Gibberella zeae | 285 | 685 |
| UPI00027CE685 | J0WV06 | Auricularia subglabra | 286 | 686 |
| UPI00028E86D6 | K2N268 | Nitratireductor indicus | 287 | 687 |
| UPI0002AD999E | L7VH66 | Thermoclostridium stercorarium | 288 | 688 |
| UPI0002AF2DE3 | L8A1S2 | Geobacillus sp. | 289 | 689 |
| UPI000327C3CC | M9ZC55 | uncultured bacterium | 290 | 690 |
| UPI000059ACE1 | Q0BAK2 | Burkholderia ambifaria | 291 | 691 |
| UPI0000676B8D | Q2UIR4 | Aspergillus oryzae | 292 | 692 |
| UPI00004269B5 | Q66DJ0 | Yersinia pseudotuberculosis | 293 | 693 |
| UPI000331CC98 | R9AF64 | Wallemia ichthyophaga | 294 | 694 |
| UPI0003522404 | S3DIM6 | Glarea lozoyensis | 295 | 695 |
| UPI0003BF753A | V2YU31 | Moniliophthora roreri | 296 | 696 |
| UPI0003DBCB4F | W2ULL3 | Zhouia amylolytica | 297 | 697 |
| UPI0003F362FF | W9NQQ3 | Fusarium oxysporum | 298 | 698 |
| UPI00006EA168 | A5FAA5 | Flavobacterium johnsoniae | 299 | 699 |
| UPI00002394F5 | Q75193 | Oryza sativa | 300 | 700 |
| UPI0002B65681 | M1MCD1 | Clostridium saccharoperbutylacetonicum | 301 | 701 |
| UPI0002D21DB1 | N1MBN6 | Rhodococcus sp. | 302 | 702 |
| UPI000059C0CD | Q0BCV8 | Burkholderia ambifaria | 303 | 703 |
| UPI00005CE9E7 | Q3BVH7 | Xanthomonas campestris | 304 | 704 |
| UPI00000C7604 | Q9A6F8 | Caulobacter vibrioides | 305 | 705 |
| UPI000338772A | R9GRA7 | Arcticibacter svalbardensis | 306 | 706 |
| UPI00035A4604 | S7VQ28 | Winogradskyella psychrotolerans | 307 | 707 |
| UPI0003C4ED6A | V5DXT8 | Methyloglobulus morosus | 308 | 708 |
| UPI0003E05C04 | W3WWV37 | Pestalotiopsis fici | 309 | 709 |
| UPI000434E698 | W9YNR7 | Capronia coronata | 310 | 710 |
| UPI00001268FD | P48825 | Aspergillus aculeatus | 311 | 711 |
| UPI0000DD5996 | Q0GC07 | Thermotoga neapolitana | 312 | 712 |
| UPI0002B666E8 | M1MJF4 | Clostridium saccharoperbutylacetonicum | 313 | 713 |
| UPI000006B001 | O74799 | Schizosaccharomyces pombe | 314 | 714 |
| UPI000161BD2B | Q0TXF6 | Phaeosphaeria nodorum | 315 | 715 |
| UPI00003806C8 | Q3RGJ3 | Xylella fastidiosa Dixon | 316 | 716 |
| UPI000006A330 | Q9P6J6 | Schizosaccharomyces pombe | 317 | 717 |
| UPI000337E887 | R9GWD6 | Arcticibacter svalbardensis | 318 | 718 |
| UPI0003885717 | T0KJI7 | Colletotrichum gloeosporioides | 319 | 719 |
| UPI0003C9E340 | V5R1E8 | uncultured bacterium | 320 | 720 |
| UPI0003E06A61 | W4S715 | Xanthomonas arboricola | 321 | 721 |
| UPI00021EC697 | X0A8X8 | Fusarium oxysporum | 322 | 722 |
| UPI00001108D0 | P22073 | Paenibacillus polymyxa | 323 | 723 |
| UPI0001BE5ADA | D1GCC6 | Kluyveromyces marxianus | 324 | 724 |
| UPI0002C04A25 | M5A594 | Ilumatobacter coccineus | 325 | 725 |
| UPI0000126912 | P12614 | Agrobacterium sp. | 326 | 726 |
| UPI000038ECF7 | Q11P53 | Cytophaga hutchinsonii | 327 | 727 |
| UPI00003C5CA4 | Q47PF5 | Thermobifida fusca | 328 | 728 |
| UPI0000069E5E | Q9UVJ6 | Botryotinia fuckeliana | 329 | 729 |
| UPI00033994D2 | R9PTK2 | Agarivorans albus | 330 | 730 |
| UPI00038B7639 | T0UDU2 | Enterococcus sp. | 331 | 731 |
| UPI0003D8A7DC | V5WKT4 | Salinispira pacifica | 332 | 732 |
| UPI0003ECF15E | W6P696 | Bacteroides xylanisolvens | 333 | 733 |
| UPI000430029A | X0AB46 | Fusarium oxysporum | 334 | 734 |
| UPI0000126906 | Q08638B | Thermotoga maritima | 335 | 735 |
| UPI0000083EA8 | Q8T0W7 | Neotermes koshunensis | 336 | 736 |
| UPI0002BF34B3 | M5CHG9 | Thanatephorus cucumeris | 337 | 737 |
| UPI000053581D | P14002 | Hungateiclostridium thermocellum | 338 | 738 |
| UPI0000D76A70 | Q1IJ89 | Koribacter versatilis | 339 | 739 |
| UPI00005203D8 | Q4WLX5 | Neosartorya fumigata | 340 | 740 |
| UPI00032DB8C1 | R1FKF0 | Amycolatopsis vancoresmycina | 341 | 741 |
| UPI0003519C76 | S0EKU1 | Gibberella fujikuroi | 342 | 742 |
| UPI000390F839 | T2I2H5 | Bifidobacterium longum | 343 | 743 |
| UPI0003DFF0DA | W0FLD1 | uncultured bacterium | 344 | 744 |
| UPI0002D3D994 | W6P9J9 | Bacteroides xylanisolvens | 345 | 745 |
| UPI00042F8016 | X0HA35 | Fusarium oxysporum | 346 | 746 |
| UPI00000A7F40 | Q41290 | Sorghum bicolor | 347 | 747 |
| UPI000050B701 | Q53EH2 | Clostridium cellulovorans | 348 | 748 |
| UPI0002C29EAA | M5G1U5 | Dacryopinax primogenitus | 349 | 749 |
| UPI0000126913 | P27034 | Rhizobium radiobacter | 350 | 750 |
| UPI00006E0CC7 | Q25BW5A | Phanerochaete chrysosporium | 351 | 751 |
| UPI0000126905 | Q59437 | Enterobacter agglomerans | 352 | 752 |
| UPI00033056C4 | R4YWU4 | Candidatus microthrix | 353 | 753 |
| UPI0003427F29 | S0ET37 | Chthonomonas calidirosea | 354 | 754 |
| UPI0003B04208 | U4KMR7 | Acholeplasma brassicae | 355 | 755 |
| UPI0003E13BD3 | W0LJ28 | Chania multitudinisentens | 356 | 756 |
| UPI0003ECCF80 | W7MW98 | Gibberella moniliformis | 357 | 757 |
| UPI0004305856 | X0I2U8 | Fusarium oxysporum | 358 | 758 |
| UPI00006E0CC7 | Q25BW5B | Phanerochaete chrysosporium | 359 | 759 |
| UPI00000A7EFC | Q9FYS3 | Secale cereale | 360 | 760 |
| UPI0002C0273E | M5QUM2 | Anoxybacillus gonensis | 361 | 761 |
| UPI0000126906 | Q08638A | Thermotoga maritima | 362 | 762 |
| UPI00003C2ACC | Q2RP51 | Rhodospirillum rubrum | 363 | 763 |
| UPI00000B9013 | Q60038 | Thermotoga neapolitana | 364 | 764 |
| UPI00032F466E | R4Z6M6 | Candidatus microthrix | 365 | 765 |
| UPI00032874EC | S0FPI8 | Ruminiclostridium cellobioparum | 366 | 766 |
| UPI0003B0490C | U4KMV4 | Acholeplasma brassicae | 367 | 767 |
| UPI0003DB6EFD | W1BBP5 | Klebsiella pneumoniae | 368 | 768 |
| UPI00045BB507 | X8JI88 | Rhizoctonia solani | 370 | 770 |
| UPI0000072C73 | Q9H227 | Homo sapiens | 371 | 771 |
| UPI0000DD5304 | Q0GMU3 | uncultured bacterium | 372 | 772 |
| UPI0002CA9E4F | M8CQD9 | Thermoanaerobacter thermohydrosulfuricus | 373 | 773 |
| UPI0000E297D8 | Q091M8 | Stigmatella aurantiaca | 374 | 774 |
| UPI00006676B1 | Q2T7C9 | Burkholderia thailandensis | 375 | 775 |
| UPI0000426E8F | Q665S2 | Yersinia pseudotuberculosis | 376 | 776 |
| UPI00032BF71F | R8BQM8 | Togninia minima | 377 | 777 |
| UPI00035213C2 | S3BVJ8 | Ophiostoma piceae | 378 | 778 |
| UPI0003B117B7 | U4LIL3 | Pyronema omphalodes | 379 | 779 |
| UPI0001F76D1F | W1QIW0 | Ogataea parapolymorpha | 380 | 780 |
| UPI0003F2059F | W8F6U0 | Hymenobacter swuensis | 381 | 781 |
| UPI00006E8E1B | A5FEF5 | Flavobacterium johnsoniae | 382 | 782 |
| UPI000012690B | P22505 | Paenibacillus polymyxa | 383 | 783 |
| UPI000009D014 | Q8L7J2 | Oryza sativa | 384 | 784 |
| UPI0000E580F2 | B8AVF0 | Oryza sativa | 385 | 785 |
| UPI000EA7F16F | A0A452CSM4 | Nannochloris | 386 | 786 |
| UPI00006AE508 | B8CYA8 | Halothermothrix orenii | 387 | 787 |
| UPI000018B2B4 | Q7RWP2 | Neurospora crassa | 388 | 788 |
| UPI000192BB5F | B9V8P5 | Micrococcus antarcticus | 389 | 789 |
| UPI000285E79E | K0A8J9 | Exiguobacterium antarcticum | 390 | 790 |
| UPI00000BEB61 | Q9RA61 | Thermus thermophilus | 391 | 791 |
| UPI00078BF747 | A0A2T4AR08 | Trichoderma harzianum | 392 | 792 |
| UPI000006AA61 | Q12715 | Hypocrea jecorina | 393 | 793 |
| UPI00000B411B | Q59976 | Streptomyces sp. | 394 | 794 |
| UPI00000C7E56 | Q99YP9 | Streptococcus pyogenes | 395 | 795 |
| UPI000012691B | P26205 | Trifolium repens | 396 | 796 |
| UPI000006C8FF | Q8TGI8 | Talaromyces emersonii | 397 | 797 |
| UPI0000126903 | P26208 | Hungateiclostridium thermocellum | 398 | 798 |
| UPI000219FE3E | F9ULH8 | Lactobacillus plantarum | 399 | 799 |
| UPI0003F2033A | A0A2I4PGZ0 | Agrobacterium tumefaciens | 400 | 800 |

Experiment 4-1—Screening of Glucosidases for Deglycosylation with Purified QS-18 (0.04 mg/ml) at pH 7.5 and Room Temperature

[2977] Nucleotide sequences were sub-cloned into pET24b+ for expression. 10 uL of E. coli cells (One Shot® BL21(DE3) chemically competent E. coli) were transferred to each well of a 96 well PCR plate (prechilled on ice). 10 uL autoclaved water was added to the DNA, resuspended by pipetting, and 1 uL of plasmid DNA (15-30 ng) was transferred to the competent cells. Immediately after addition, the resulting mixture was mixed by pipetting. Cells were heat shocked by placing the plate in a thermal cycler at 42° C. for 30 seconds then transferred directly to an ice bath for 2 min. 100 uL sterile Lysogeny Broth (LB) medium was added to each well containing transformed cells. The content of each plate was transferred into a 96-deep well plate pre-aliquoted with 400 uL LB and the plate was incubated at 37° C. with shaking and 85% humidity for 1 hour. After outgrowth, 500 uL of sterile LB containing 100 ug/mL kanamycin was added to the plates containing cells and plates incubated at 37° C. with shaking overnight (18 hours) with humidity control (85%).

[2978] 1000 mLs of Overnight Express Media was supplemented with 1 mL kanamycin 50 mg/mL and 20 mL of 50% v/v glycerol added (50 ug/mL kanamycin final and 1% glycerol). 96-Well Assay Block 2 mL plates were aliquoted with 380 uL of media per well. Pre-inoculum (20 uL) from transformation plates was added. The plates were sealed appropriately and incubated at 37° C. at 300 with shaking for 2 h. After 2 h the temperature was lowered to 20° C. and incubation continued for 20 h.

[2979] The liquid cultures were centrifuged for 10 minutes at 4° C. The supernatant was discarded, plates blotted on an absorbent material to remove residue and the plates frozen at −80° C.

[2980] Lysis buffer was prepared according to the following protocol:
[2981] 1. Polymyxin B sulphate (0.5 mg/mL) was suspended in 100 mM potassium phosphate pH 7.5
[2982] 2. The mixture was sonicated until polymyxin B sulphate had dissolved
[2983] 3. Lysozyme (1 mg/mL) and benzonase (0.1 uL/mL lysis buffer) were added

[2984] 2 copies of each cell pellet plate were removed from −80 degC freezer and allowed to thaw. 200 uL of lysis buffer was added to each well of one copy of the cell pellet plates. Plates were shaken at room temperature for 10 mins. 190 uL of cell pellet/lysis buffer was transferred to a corresponding fresh cell pellet plate. These plates were incubated at room temperature with shaking for 2 hours. Lysate was clarified by centrifugation (10 min, 4 degC).

[2985] QS-18 was obtained by analogous methods to Example 3, collecting a QS-18 containing phenyl fraction following phenyl treatment (presence of m/z corresponding to key components was confirmed by MS and the phenyl fraction then used without further treatment). QS-18 solution was prepared by diluting aqueous QS-18 (ca 1 mg/mL) with 100 mM potassium phosphate pH 7.5 to 0.2 mg/ml. 40 uL clarified lysate was transferred into fresh 96 well PCR plates. 10 uL QS-18 solution added to each well of lysate to a final concentration of 0.04 mg/ml. Incubated at room temperature with shaking for 20 h. Quenched with 50 uL MeCN and shaken at room temperature for 10 mins. Samples were analysed by LC-MS/MS using a Waters Acquity H class coupled to a Waters Xevo Tandem Quadrupole (TQD) Mass Spectrometer.

### LCMS/MS 3 Min Method

UPLC Conditions

| Column | Waters BEH C18 1.7 um 2.1 × 50 mm | | |
|---|---|---|---|
| Temperature | 40° C. ± 3° C. | | |
| Flow Rate | 0.5 mL/min | | |
| Gradient Curve | 6 | | |
| Injection Volume | 1 μL | | |
| Autosampler Temperature | 10° C. ± 3° C. | | |
| Run Time | 3 mins | | |
| Post-Inject Wash | 50% v/v methanol | | |
| Mobile Phase A | 0.1% v/v Formic Acid in Water | | |
| Mobile Phase B | 0.1% v/v Formic Acid in Acetonitrile | | |
| Syringe Wash Solvent | 50% v/v Methanol | | |
| Seal Wash | 50% v/v Methanol | | |
| Purge Solvent | 50% v/v Acetonitrile | | |
| Gradient | Time | %A | %B |
| | 0 | 55 | 45 |
| | 0.75 | 55 | 45 |
| | 2.00 | 5 | 95 |
| | 2.1 | 5 | 95 |
| | 2.2 | 55 | 45 |
| | 3.0 | 55 | 45 |

Mass Spec Conditions (or similar to give maximum sensitivity)

| Source | | Analyser | | Extended Tab | |
|---|---|---|---|---|---|
| Capillary Voltage | 3.9 kV | LM Resolution 1 | 11.6 | Source Temp | 150° C. |
| Cone | 36 V | HM Resolution 1 | 14.9 | Extractor | 3 V |
| Desolvation | 500° C. | Ion Energy 1 | 0.4 | RF Lens | 2.5 V |
| Temperature | | | | | |
| Source Temperature | 150° C. | LM Resolution 2 | 12.2 | Entrance | 30 |
| Source Gas Flow | | HM Resolution 2 | 14.8 | Exit | 30 |
| Desolvation Gas Flow | 1000 L/Hr | Ion Energy 2 | 0.8 | Gain | 1 |

| | | | |
|---|---|---|---|
| Cone (L/Hr) | 0 | Collision Energy | 3 |

| | |
|---|---|
| Collision Gas | Argon |

| | | Dwell | | Cone | Collision |
|---|---|---|---|---|---|
| | | Time | | Voltage | Energy |
| Component | Mode | (secs) | MRM Transitions | (V) | (v) |
| QS-18 2150 | ESI - | Auto | 1074.50 > 836.4 | 34 | 16 |
| QS-21 1988 | ESI - | Auto | 993.46 > 755.5 | 34 | 16 |

Enzyme activity was calculated as:

$$\% conversion = \frac{100 \times QS - 21 peak area}{( QS - 21 peak area + QS - 18 peak area )}$$

[2987] The negative control reactions, which utilised a plasmid expressing an unrelated protein, had an average % conversion of 0.42% with a standard deviation (S.D.) of 0.10%. Candidate enzymes with % conversion >0.72%, i.e. >3 S.D. above negative control, were considered to be positive hits and are listed below in Table 7. Sample results are shown in FIG. 10 for a QS-21 standard, FIG. 11 for negative control and FIG. 12 for treatment with the glucosidase of SEQ ID No. 262.

Experiment 4-2—Screening of Glucosidases for Deglycosylation with Purified QS-18 (1 mg/ml) at pH 6 and 30 Deg C.

[2988] Lysates were prepared in an identical manner to Experiment 4-1 above, except the lysis buffer was prepared in 100 mM potassium phosphate buffer pH 6. QS-18 solution was prepared by dissolving QS-18 in 100 mM potassium phosphate buffer pH 6 (2 mg/mL).

[2989] 12 uL clarified lysate was transferred into fresh 96 well PCR plates. 12 uL QS-18 solution was added (1 mg/ml final concentration), plates sealed and incubated overnight (30° C.) for 18 hrs. After quenching with 25 uL MeCN and shaking for 10 mins (RT), samples were analysed using the LC-MS/MS protocol described in Experiment 4-1 and enzyme activity determined in an analogous manner.

[2990] The negative control reactions had an average % conversion of 0.38% with a standard deviation (S.D.) of 0.06%. Sequences with % conversion >0.56% i.e. >3 S.D. above negative control are listed in Table 7.

Experiment 4-3—Screening of Glucosidases for Deglycosylation with QS-18 in Crude Bark Extract (1 in 2000 Dilution) at pH 7 and 30 Deg C.

[2991] Lysates were prepared according to the following procedure.

[2992] 50 uL of 50% v/v glycerol was transferred to each well of a flat bottom 96 well plate. 50 uL from each well of the overnight culture plate (in LB) from Experiment 4-1 was transferred and mixed by pipette aspiration. The plate was then covered with a foil seal and frozen at −80° C. as a glycerol stock of the transformants. Glycerol stock plates were removed from −80° C. freezer and allowed to thaw. Overnight cultures were prepared by pipetting 5 mL LB into 50 mL tubes with Kanamycin as a selection marker at a final concentration of 50 μg/mL. Cultures were inoculated with 10 μL of glycerol stock and incubated overnight at 37° C. with shaking.

[2993] Flask cultures were prepared by pipetting 25 mL Terrific Broth (TB) into 250 mL conical flasks with Kanamycin as selection marker at a final concentration of 50 μg/mL. Overnight cultures OD₆₀₀ was measured using a spectrophotometer and initial inoculum volume calculated for a starting OD˜0.1. Cultures were inoculated and incubated at 37° C. with shaking up to OD˜0.6.

[2994] Cultures were induced with 1 mM IPTG and temperature was reduced to 20° C. with shaking. Cultures were then incubated overnight. Cultures were harvested in individual 1 mL aliquots (in 2 mL tubes). 1 mL aliquots were centrifuged at 13000 g for 3 min and supernatant discarded. Pellets were frozen at −20° C.

[2995] Lysis buffer was prepared according to the following protocol:
[2996] Polymyxin B sulphate (0.5 mg/mL) and Lysozyme (1 mg/mL) were suspended in 50 mM phosphate buffer, 0.3 M NaCl, pH 8.
[2997] Benzonase (20 U/mL) and 0.05% Tween-20 were added.

[2998] 1 mL of Lysis buffer was added to a pellet from 1 mL culture aliquot. Lysed samples were incubated at room temperature with shaking for 2 hours. Lysate was clarified by centrifugation at 13000 g, 5 min, 4° C.

[2999] Crude bark extract (CBE) obtained by aqueous extraction of Quillaja saponaria and containing at least 2.80 mg/ml QS-21 (by HPLC-UV) was diluted 1 in 400 in 50 mM potassium phosphate buffer at pH 7. 100 ul diluted CBE was added to 400 ul of each lysate to give a final dilution of 1 in 2000.

[3000] As diluted CBE was added to the lysate, the solution was vortexed for ˜5 seconds and then a 80 ul sample taken and quenched with 160 ul methanol (MeOH). This was used as a time 0 sample. The reaction solutions and controls were then left to shake at 30° C. Samples were taken after 1 h in the same way as the time 0 sample. Samples were analysed by LCMS/MS using the protocol described in Experiment 4-1 and enzyme activity determined in an analogous manner.

[3001] Enzyme activity is calculated as the % conversion of the QS-18 present in the crude bark extract:

$$\% conversion = \frac{100 \times ( \% QS - {18}_{t = 0} - \% QS - {18}_{t = 1 hr} )}{\% QS - {18}_{t = 0}}$$

$$where$$

$$\% QS - 18 = \frac{100 \times QS - 18 peak area}{( QS - 21 peak area + QS - 18 peak area )}$$

### Experiment 4-4—Screening of Glucosidases for Deglycosylation of QS-18 in Crude Bark Extract (1 in 20 Dilution) to QS-21

[3002] Lysates were prepared as in Experiment 4-2.

[3003] Crude bark extract (CBE) was adjusted to pH 6 by dropwise addition of 2M NaOH with stirring. 25 uL of clarified lysate was transferred to a reaction plate, 22.5 ul of 100 mM potassium phosphate buffer pH 6 was added, 2.5 ul CBE at pH 6 was added. Reaction plates were sealed, incubated at 25 degC with shaking for 18 hours, then quenched by addition of 50 uL acetonitrile (MeCN). Quenched reaction plates were re-sealed and incubated at 20 degC with shaking for 10 min. The reaction plates were centrifuged (10 min, 4 degC) and analysed by UV HPLC with the method below:

### UV Method EM2020N435545v1_2

| Column details | ACQUITY UPLC BEH C18 Column, | | |
|---|---|---|---|
| | 130 Å, 1.7 μm, 2.1 mm × 50 mm | | |
| Column temperature | 40° C. | | |
| Mobile phase A | 0.05% v/v TFA in Water HPLC | | |
| Mobile phase B | 0.05% v/v TFA in Acetonitrile HPLC | | |
| Flow rate | 1 mL per minute | | |
| | Time | % Mobile | % Mobile |
| | (mins) | Phase A | Phase B |
| Gradient profile | 0.0 | 97 | 3 |
| 5.5 min gradient | 3.7 | 5 | 95 |
| | 4.0 | 5 | 95 |
| | 4.1 | 97 | 3 |
| | 5.5 | 97 | 3 |

| | |
|---|---|
| Detector type | UV detector: DAD or VWD |
| Detector wavelength | 214 nm |
| Agilent DAD 1260 | 4.0 nm (default setting) |
| and 1290 Bandwidth | |
| Agilent 1290 and 1260 | Off |
| DAD reference wavelength | |
| Injection volume | Default injection volume used is 1 ul |

[3005] Three key peaks of interest are apparent using this chromatography: Left Peak (retention time approximately 2.30-2.35 min) comprising mainly QS-17 family components; Middle Peak (retention time approximately 2.37-2.42 min) comprising mainly QS-18 family components and desglucosyl-QS-17 family components; and Right Peak (retention time approximately 2.44-2.50 min) comprising mainly QS-21 family components. Peak identity was supported by MS/MS.

[3006] Enzyme activity is calculated as the % conversion of the Middle Peak present in the crude bark extract:

$$\% conversion = \frac{100 \times ( \% Middle {Peak}_{t = 0} - \% Middle {Peak}_{t = 1 hr} )}{\% Middle {Peak}_{t = 0}}$$

$$where$$

$$\% Middle = \frac{100 \times Middle Peak area}{( Right Peak area + Middle Peak area )}$$

[3007] FIG. 13 provides exemplary chromatograms following glucosidase SEQ ID No. 262 treatment and for the negative control.

### Results

TABLE 7

| | | Expt 4-1 | Expt 4-2 | Expt 4-3 | Expt 4-4 |
|---|---|---|---|---|---|
| AA Seq ID | DNA Seq ID | % conv | % conv | % conv | % conv |
| 262 | 662 | 99.5 | 97.9 | 99.7 | 68.6 |
| 208 | 608 | 100.0 | 94.0 | 26.0 | <3 |
| 63 | 463 | 95.6 | 54.2 | N.T. | <3 |
| 229 | 629 | 91.1 | 14.2 | N.T. | <3 |
| 250 | 650 | 88.5 | 36.0 | 2.6 | <3 |
| 5 | 405 | 70.8 | 16.6 | 1.4 | <3 |
| 101 | 501 | 28.2 | 1.0 | 1.8 | <3 |
| 207 | 607 | 27.4 | 4.4 | 0.2 | <3 |
| 169 | 569 | 19.8 | 2.1 | 2.4 | <3 |
| 247 | 647 | 18.0 | 2.0 | 2.7 | <3 |
| 302 | 702 | 17.2 | 2.1 | N.T. | <3 |
| 324 | 724 | 13.6 | 0.9 | N.T. | <3 |
| 319 | 719 | 10.2 | 0.4 | N.T. | <3 |
| 9 | 409 | 9.2 | 0.9 | N.T. | <3 |
| 240 | 640 | 9.0 | 0.5 | N.T. | <3 |
| 325 | 725 | 6.3 | 0.9 | N.T. | <3 |
| 338 | 738 | 6.3 | 0.5 | N.T. | <3 |
| 116 | 516 | 4.7 | 0.5 | N.T. | <3 |
| 41 | 441 | 4.0 | 0.7 | N.T. | N.T. |
| 133 | 533 | 3.7 | 0.4 | N.T. | <3 |
| 350 | 750 | 2.6 | 0.7 | N.T. | <3 |
| 234 | 634 | 2.5 | 0.7 | N.T. | <3 |
| 380 | 780 | 2.4 | 0.5 | N.T. | <3 |
| 32 | 432 | 2.2 | 0.6 | N.T. | N.T. |
| 312 | 712 | 1.6 | 0.4 | N.T. | N.T. |
| 222 | 622 | 1.6 | 0.4 | N.T. | <3 |
| 354 | 754 | 1.6 | 0.5 | N.T. | <3 |
| 339 | 739 | 1.4 | 0.5 | N.T. | <3 |
| 365 | 765 | 1.3 | 0.4 | N.T. | <3 |
| 35 | 435 | 1.2 | 0.4 | N.T. | N.T. |
| 176 | 576 | 1.2 | 0.4 | N.T. | <3 |
| 370 | 770 | 1.1 | 0.5 | N.T. | N.T. |
| 152 | 552 | 1.1 | 0.5 | N.T. | N.T. |
| 274 | 674 | 0.9 | 0.3 | N.T. | N.T. |
| 84 | 484 | 0.8 | 0.4 | N.T. | N.T. |
| 102 | 502 | 0.7 | 0.4 | N.T. | N.T. |
| 178 | 578 | 0.5 | 0.8 | N.T. | N.T. |
| 4 | 404 | 0.4 | 0.6 | N.T. | N.T. |
| Negative control | | 0.42 | 0.38 | 0 | <3 |
| | | S.D. = 0.10 | S.D. = 0.06 | | |

N.T. indicates not tested

[3009] Based on detection of QS-18 2150 and QS-21 1988 components by LCMS/MS (Examples 4-1, 4-2 and 4-3) or UV HPLC quantification of Middle Peak (mainly QS-18 family and desglucosyl-QS-17 family) and Right Peak (mainly QS-21 family) (Example 4-4), Example 4 shows that a number of suitable glucosidases could be identified by screening a set of candidate enzymes (38 from 400, 9.5%). Glucosidases were capable of converting QS-18 family components to QS-21 family components at a range of pHs, concentrations of starting materials and purity of starting materials.

[3010] Although certain candidate enzymes did not demonstrate notable conversion under the conditions tested, this may be due to issues with enzyme expression, suitability of conditions (i.e. enzymes may function under other conditions) or a fundamental lack of required enzyme activity.

### Example 5—Screening of Additional Glucosidases for Deglycosylation of QS-18 to QS-21

### Method

### Enzyme Selection

[3011] Additional candidate glucosidases were selected based on amino acid similarity to an active site model based on positive hits from Example 4.

[3012] A final set of 94 additional candidate enzymes was selected. Codon optimized polynucleotide sequences encoding each selected enzyme linked to an N-terminal 6×His tag were prepared. Details of the additional candidate enzyme and polynucleotide sequences are summarised below in Table 8.

TABLE 8
Additional glucosidase candidate sequences

| | | | AA | DNA |
|---|---|---|---|---|
| | | | Seq | Seq |
| UniParc | Uniprot | Organism | ID | ID |
| UPI000503B26C | A0A086YYS8 | Bifidobacterium actinocoloniiforme | 801 | 895 |
| UPI000502B461 | A0A087CD28 | Bifidobacterium psychraerophilum | 802 | 896 |
| UPI00052B8681 | A0A0A2K704 | Penicillium italicum | 803 | 897 |
| UPI0005ED0AE6 | A0A0M2HDB3 | Microbacterium trichothecenolyticum | 804 | 898 |
| UPI0008206F38 | A0A1C616A3 | uncultured Clostridium sp. | 805 | 899 |
| UPI000BC57319 | A0A261Y7Q8 | Bifiguratus adelaidae | 806 | 900 |
| UPI000B3B73CD | A0A378ZIK3 | Paenibacillus thiaminolyticus | 807 | 901 |
| UPI000F8FB9BA | A0A3S9WE68 | Microbacterium lemovicicum | 808 | 902 |
| UPI00019923DC | C1A1N4 | Rhodococcus erythropolis | 809 | 903 |
| UPI00022C19B5 | G4CZU8 | Cutibacterium avidum | 810 | 904 |
| UPI0002C5A938 | M5BD10 | Clavibacter michiganensis | 811 | 905 |
| UPI0003DE3509 | W0ZC23 | Microbacterium sp. | 812 | 906 |
| UPI000507F38A | A0A086YZL4 | Bifidobacterium actinocoloniiforme | 813 | 907 |
| UPI000506119A | A0A087CR26 | Bifidobacterium reuteri | 814 | 908 |
| UPI0005A5CAC2 | A0A0A8RX48 | Propionibacterium freudenreichii | 815 | 909 |
| UPI0005EC18F9 | A0A0M2HRU0 | Microbacterium hydrocarbonoxydans | 816 | 910 |
| UPI00094B6D3B | A0A1Q8KSV8 | Pseudonocardia sp. | 817 | 911 |
| UPI000BC13DF0 | A0A292PKV5 | Tuber aestivum | 818 | 912 |
| UPI000E5B4EA5 | A0A383S7A9 | Propionibacterium australiense | 819 | 913 |
| UPI001004B2C9 | A0A428T6E2 | Fusarium sp. | 820 | 914 |
| UPI0001B69B5C | C7ZBV0 | Nectria haematococca | 821 | 915 |
| UPI00023EBB15 | G8S3E7 | Actinoplanes sp. | 822 | 916 |
| UPI0003289BC6 | N0CMW2 | Streptomyces fulvissimus | 823 | 917 |
| UPI0003E02BF1 | W3WXF1 | Pestalotiopsis fici | 824 | 918 |
| UPI0005025F2E | A0A086ZGP0 | Bifidobacterium bohemicum | 825 | 919 |
| UPI0005084E52 | A0A087D0Q2 | Bifidobacterium saeculare | 826 | 920 |
| UPI00059674D6 | A0A0B7JW24 | Bionectria ochroleuca | 827 | 921 |
| UPI0006C6D6F9 | A0A174AU04 | Bifidobacterium pseudocatenulatum | 828 | 922 |
| UPI00094ABAB3 | A0A1Q8LPB4 | Pseudonocardia sp. | 829 | 923 |
| UPI000CB49A0B | A0A2H5Z8Q4 | bacterium | 830 | 924 |
| UPI000E38A995 | A0A3D8Q771 | Coleophoma crateriformis | 831 | 925 |
| UPI001102DFA3 | A0A4Z0Y5Y8 | Arthrobotrys oligospora | 832 | 926 |
| UPI0001ECDCBD | E3RFS2 | Pyrenophora teres | 833 | 927 |
| UPI00024F2A26 | H6MTQ7 | Gordonia polyisoprenivorans | 834 | 928 |
| UPI0000E28E5D | Q08S21 | Stigmatella aurantiaca | 835 | 929 |
| UPI0003E03A52 | W3WZ03 | Pestalotiopsis fici | 836 | 930 |
| UPI0003B7B6EE | A0A087BEN9 | Bifidobacterium magnum | 837 | 931 |
| UPI000503F283 | A0A087DFL8 | Bifidobacterium stellenboschense | 838 | 932 |
| UPI00059673EE | A0A0B7K316 | Bionectria ochroleuca | 839 | 933 |
| UPI0006C069F3 | A0A174LVE3 | Hungatella hathewayi | 840 | 934 |
| UPI00097EB800 | A0A1R4J2F9 | Mycetocola reblochoni | 841 | 935 |
| UPI0009ABD7B3 | A0A2P9IX34 | Nonomuraea sp. | 842 | 936 |
| UPI000E391DF6 | A0A3D8T9C2 | Coleophoma crateriformis | 843 | 937 |
| UPI0000EC83AE | A1R2K1 | Paenarthrobacter aurescens | 844 | 938 |
| UPI0001F21F08 | E4N4F6 | Kitasatospora setae | 845 | 939 |
| UPI00027E251E | J7L3Z8 | Nocardiopsis alba | 846 | 940 |
| UPI0000DBA338 | Q0SCI4 | Rhodococcus jostii | 847 | 941 |
| UPI0003EC942D | W5X324 | uncultured microorganism | 848 | 942 |
| UPI0005084B63 | A0A087BJ88 | Bifidobacterium merycicum | 849 | 943 |
| UPI0005018B5B | A0A087DGT3 | Bifidobacterium scardovii | 850 | 944 |
| UPI00021EC81E | A0A0C4DJL4 | Fusarium oxysporum | 851 | 945 |
| UPI0007CE199C | A0A177BXH1 | Paraphaeosphaeria sporulosa | 852 | 946 |
| UPI0009A50F8D | A0A1V4IY77 | Clostridium oryzae | 853 | 947 |
| UPI000D22F5EB | A0A2T2N4T6 | Corynespora cassiicola | 854 | 948 |
| UPI000F7332F8 | A0A3N4J9R6 | Choiromyces venosus | 855 | 949 |
| UPI0000F550EC | A4F982 | Saccharopolyspora erythraea | 856 | 950 |
| UPI000204906E | F2R0Y2 | Streptomyces venezuelae | 857 | 951 |
| UPI00027DFDB0 | J7LVB1 | Arthrobacter sp. | 858 | 952 |
| UPI00033420CB | R7RMQ6 | Thermobrachium celere | 859 | 953 |
| UPI0003EA65B9 | W7HT93 | Drechslerella stenobrocha | 860 | 954 |
| UPI0003B38542 | A0A087BMR5 | Bifidobacterium minimum | 861 | 955 |
| UPI000409825E | A0A087E3K8 | Bifidobacterium thermacidophilum | 862 | 956 |
| UPI0005C0229F | A0A0D1X9G0 | Verruconis gallopava | 863 | 957 |
| UPI0007CECAD5 | A0A178AER7 | Stagonospora sp. | 864 | 958 |
| UPI0009D58C49 | A0A1V6ALF9 | Firmicutes bacterium | 865 | 959 |
| UPI000D50EED1 | A0A2T6ZNU7 | Tuber borchii | 866 | 960 |
| UPI000F728167 | A0A3N4KUR3 | Morchella conica | 867 | 961 |
| UPI00018152EB | B5YC96 | Dictyoglomus thermophilum | 868 | 962 |
| UPI000210C01C | F5XL24 | Microlunatus phosphovorus | 869 | 963 |
| UPI00028BB1B6 | K4IPD2 | Bifidobacterium asteroides | 870 | 964 |
| UPI00035AE576 | S8BQ60 | Dactylellina haptotyla | 871 | 965 |
| UPI0003F2D7DD | W9JF54 | Fusarium oxysporum | 872 | 966 |
| UPI0005067FF9 | A0A087BRY2 | Bifidobacterium longum | 873 | 967 |
| UPI0004105550 | A0A087EK01 | Bifidobacterium tsurumiense | 874 | 968 |
| UPI0005BF9DF9 | A0A0D1YG50 | Exophiala spinifera | 875 | 969 |
| UPI0007CE7DBA | A0A178E511 | Pyrenochaeta sp. | 876 | 970 |
| UPI0009CDA3F1 | A0A1V6FLK2 | Firmicutes bacterium | 877 | 971 |
| UPI000D5A9E68 | A0A2V1B599 | Cadophora sp. | 878 | 972 |
| UPI000F7330CD | A0A3N4L4M3 | Morchella conica | 879 | 973 |
| UPI000189C68F | B8DV42 | Bifidobacterium animalis | 880 | 974 |
| UPI00020ED2C9 | F5YGD5 | Treponema azotonutricium | 881 | 975 |
| UPI0002988429 | K7S0E5 | Acidipropionibacterium acidipropionici | 882 | 976 |
| UPI0003D93613 | V5WNB6 | Salinispira pacifica | 883 | 977 |
| UPI000503588E | A0A087C760 | Bifidobacterium mongoliense | 884 | 978 |
| UPI000499F5D1 | A0A087VUW4 | Bifidobacterium indicum | 885 | 979 |
| UPI000659257F | A0A0G4K5C2 | Brachyspira suanatina | 886 | 980 |
| UPI0007F2FD44 | A0A194X8Q9 | Phialocephala scopiformis | 887 | 981 |
| UPI000A2BB4A5 | A0A1Y5P895 | uncultured Microbacterium sp. | 888 | 982 |
| UPI000D5BC9BD | A0A2V1E673 | Periconia macrospinosa | 889 | 983 |
| UPI000F3DC30B | A0A3P5WTE2 | Arthrobacter ulcerisalmonis | 890 | 984 |
| UPI0001664880 | B8H9A2 | Pseudarthrobacter chlorophenolicus | 891 | 985 |
| UPI0002120C63 | F7PUF3 | Haloplasma contractile | 892 | 986 |
| UPI0002B73341 | M2ULB2 | Cochliobolus heterostrophus | 893 | 987 |
| UPI0003DE58EA | W0Z818 | Microbacterium sp. | 894 | 988 |

Experiment 5-1—Screening of Additional Glucosidases for Deglycosylation with Purified QS-18 (0.04 mg/ml) at pH 7.5 and 30 Deg C.

[3013] The 94 additional genes, together with positive control (DNA encoding SEQ ID No. 262) and negative control, were transformed, expressed, lysed and reacted in the same manner as described above for Experiment 4-1, except the reaction was incubated at 30 degrees C. for 18 hours.

[3014] Samples were analysed by LCMS/MS according to the procedure in Experiment 4-1. The results for all enzymes demonstrating a % conversion of at least 3 are shown in Table 9.

Experiment 5-2—Screening of Additional Glucosidases for Deglycosylation with QS-18 in Crude Bark Extract (80%) at pH 6 and 35 Deg C.

[3015] A plate was lysed at pH 6 as described in Experiment 4-2. 40 uL of clarified lysate was transferred to a reaction plate

[3016] The pH of CBE was adjusted to pH 6 by dropwise addition of 2M NaOH with stirring. 160 uL of pH 6 CBE was added to each well of the reaction plate. The reaction plate was sealed and incubated at 35 deg C. with shaking for 18 hours.

[3017] The reaction plate was quenched by adding 200 uL of MeCN (2% acetic acid (AcOH), 1 mg/mL hexanophenone) to each well of the plates. The quenched reaction plate was re-sealed and incubated at 20 deg C. with shaking for 10 min. The reaction plate was then centrifuged (10 min, 4 degC).

[3018] 200 uL was transferred from each well of the quenched plate to the corresponding wells of a fresh 96 well plate and sealed. The plate was analysed by UV HPLC with the method of Experiment 4-4.

Experiment 5-3—Screening of Additional Glucosidases for Deglycosylation with QS-18 in Treated Bark Extract (80%) at pH 6 and 35 Deg C.

[3019] Experiment 5-1 was repeated, replacing CBE with Treated Bark Extract (TBE) at pH 6. TBE was prepared from CBE by PVPP treatment and concentration, to provide TBE with a QS-21 concentration of approximately 4 g/L. TBE was adjusted to pH 6 by dropwise addition of 2M NaOH with stirring.

TABLE 9

| AA | DNA | Experiment 5-1 | Experiment 5-2 | Experiment 5-3 |
|---|---|---|---|---|
| Seq ID | Seq ID | % conv | % conv | % conv |
| 262 | 662 | 98.7 | 5.5 | 8.5 |
| 850 | 944 | 95.3 | <0.5 | <0.5 |
| 879 | 973 | 90.1 | <0.5 | <0.5 |
| 868 | 962 | 89.9 | <0.5 | <0.5 |
| 826 | 920 | 86.9 | 0.8 | 1.4 |
| 804 | 898 | 83.2 | <0.5 | <0.5 |
| 888 | 982 | 78.0 | <0.5 | <0.5 |
| 881 | 975 | 77.5 | <0.5 | <0.5 |
| 891 | 985 | 74.7 | <0.5 | <0.5 |
| 816 | 910 | 73.5 | <0.5 | <0.5 |
| 827 | 921 | 69.2 | <0.5 | <0.5 |
| 857 | 951 | 69.0 | <0.5 | <0.5 |
| 853 | 947 | 67.7 | <0.5 | 2.5 |
| 842 | 936 | 64.0 | <0.5 | <0.5 |
| 814 | 908 | 58.4 | <0.5 | <0.5 |
| 886 | 980 | 55.5 | <0.5 | <0.5 |
| 885 | 979 | 54.8 | <0.5 | <0.5 |
| 838 | 932 | 53.4 | <0.5 | <0.5 |
| 829 | 923 | 52.3 | <0.5 | <0.5 |
| 808 | 902 | 52.0 | <0.5 | <0.5 |
| 828 | 922 | 50.7 | <0.5 | <0.5 |
| 870 | 964 | 49.7 | <0.5 | <0.5 |
| 873 | 967 | 43.9 | <0.5 | <0.5 |
| 844 | 938 | 43.6 | <0.5 | <0.5 |
| 882 | 976 | 31.4 | <0.5 | <0.5 |
| 874 | 968 | 29.4 | <0.5 | <0.5 |
| 825 | 919 | 24.5 | <0.5 | <0.5 |
| 824 | 918 | 23.5 | <0.5 | <0.5 |
| 823 | 917 | 23.1 | <0.5 | <0.5 |
| 810 | 904 | 22.7 | <0.5 | <0.5 |
| 894 | 988 | 21.3 | <0.5 | <0.5 |
| 849 | 943 | 17.8 | <0.5 | <0.5 |
| 803 | 897 | 13.1 | <0.5 | <0.5 |
| 890 | 984 | 12.6 | <0.5 | <0.5 |
| 841 | 935 | 12.3 | <0.5 | <0.5 |
| 832 | 926 | 9.8 | <0.5 | <0.5 |
| 830 | 924 | 9.3 | <0.5 | <0.5 |
| 845 | 939 | 9.2 | <0.5 | <0.5 |
| 871 | 965 | 7.8 | <0.5 | <0.5 |
| 837 | 931 | 7.6 | <0.5 | <0.5 |
| 883 | 977 | 7.0 | <0.5 | <0.5 |
| 809 | 903 | 6.3 | <0.5 | <0.5 |
| 875 | 969 | 4.7 | <0.5 | <0.5 |
| 862 | 956 | 4.2 | <0.5 | <0.5 |
| 864 | 958 | 3.9 | <0.5 | <0.5 |
| 848 | 942 | 3.8 | <0.5 | <0.5 |
| 805 | 899 | 3.8 | <0.5 | <0.5 |
| 854 | 948 | 3.7 | <0.5 | <0.5 |
| 840 | 934 | 3.5 | <0.5 | <0.5 |
| 817 | 911 | 3.5 | <0.5 | <0.5 |
| 819 | 913 | 3.2 | <0.5 | <0.5 |
| 876 | 970 | 3.1 | <0.5 | <0.5 |

| | | | |
|---|---|---|---|
| Negative control | 0.8 | <0.5 | <0.5 |

[3020] Based on detection of QS-18 2150 and QS-21 1988 components by LCMS/MS (Example 5-1) or UV HPLC quantification of Middle Peak (mainly QS-18 family and desglucosyl-QS-17 family) and Right Peak (mainly QS-21 family) (Examples 5-2 and 5-3), Example 5 shows that a number of suitable glucosidases could be identified by screening a set of candidate enzymes, and also that candidate enzymes demonstrating similarity to previously identified suitable glucosidases were more likely to also be suitable glucosides (51 from 94, 54%). Glucosidases were capable of converting QS-18 family components to QS-21 family components at a range of pHs, concentrations of starting materials and purity of starting materials.

[3021] Again, although certain candidate enzymes did not demonstrate notable conversion under the conditions tested, this may be due to issues with enzyme expression, suitability of conditions (i.e. enzymes may function under other conditions) or a fundamental lack of required enzyme activity.

### Example 6—Screening of Rhamnosidases for Derhamnosylation of QS-17 to QS-18

### Method

### Enzyme Selection

[3022] Conversion of QS-17 family components to QS-18 family components involves hydrolysis of the 1,2 glycosidic bond between the alpha-L-arabinofuranose and alpha-L-rhamnose found at the terminus of the acyl chain portion of the molecules. Glycoside hydrolases from families 78 and 106 exhibit the exo-alpha-1,2 rhamnosidase activity (E.C. 3.2.1.40) necessary to cleave this bond as annotated by the CAZy (Carbohydrate Active enZyme) database (www.cazy.com). All sequences annotated by CAZy from GH families 78 and 106 were obtained, and separate curated hidden Markov model profiles constructed for each which were then used to identify additional familial enzymes by searching the 209 million protein member Uniprot (www.uniprot.org) knowledgebase with the software HMMER (Eddy, 1998). In total, 11,749 sequences were identified: 10,653, and 1096 representatives from GH families 78 and 106, respectively. MMSeqs2 (Hauser, 2016) was then used to cluster each group of enzyme sequences using the default clustering workflow and parameters with a minimum sequence identity and coverage of 30% and 80%, respectively. In cases where the initial clustering yielded clusters with more than 1000 members, a second sub-clustering was performed at a higher 50% or 70% identity to ensure diverse exemplars from these larger clusters were represented more prominently. All clusters were then examined, and exemplars selected from each with preferences for annotation quality, known experimental activity, existing three dimensional structures from the Protein Data Bank (www.wwpdb.org) or known extremophile organisms as annotated by Uniprot. A final set of 94 diverse candidate enzymes was selected. Polynucleotide sequences encoding each selected enzyme linked to a C-terminal 6×His tag and Tev-cleavage site (amino acid sequence for linker His-tag, inserted N-terminally of stop codon, is provided in SEQ ID No. 1178) were prepared using a proprietary genetic-algorithm based codon optimization code.

[3023] Details of the candidate enzyme and polynucleotide sequences are summarised below in Table 10.

TABLE 10
Rhamnosidase candidate sequences

| | | | AA | DNA |
|---|---|---|---|---|
| | | | Seq | Seq |
| UniParc | Uniprot | Organism | ID | ID |
| UPI0001A31108 | D0MFR0 | Rhodothermus marinus | 989 | 1083 |
| UPI0001D90BFE | D7C463 | Streptomyces bingchenggensis | 990 | 1084 |
| UPI0001A3AEAC | D2QL60 | Spirosoma linguale | 991 | 1085 |
| UPI0001CD6D48 | D4L2K8 | Roseburia intestinalis | 992 | 1086 |
| UPI000442EF22 | X5DG83 | Draconibacterium orientale | 993 | 1087 |
| UPI00019E052B | C7QC24 | Catenulispora acidiphila | 994 | 1088 |
| UPI000005ADE1 | Q8A916 | Bacteroides thetaiotaomicron | 995 | 1089 |
| UPI000172B2E3 | B1ZRE4 | Opitutus terrae | 996 | 1090 |
| UPI00015FE0BE | A9KJP8 | Lachnoclostridium phytofermentans | 997 | 1091 |
| UPI00022DA3ED | M4NH01 | Rhodanobacter denitrificans | 998 | 1092 |
| UPI0001D07633 | D5ETD9 | Prevotella ruminicola | 999 | 1093 |
| UPI000259E388 | I0AZ41 | Aspergillus terreus | 1000 | 1094 |
| UPI0001A461B6 | C7MA58 | Brachybacterium faecium | 1001 | 1095 |
| UPI00006E4A0D | A5FCH3 | Flavobacterium johnsoniae | 1002 | 1096 |
| UPI000245C507 | H2IYR2 | Rahnella aquatilis | 1003 | 1097 |
| UPI0003E4E711 | W4N6H0 | Bifidobacterium moukalabense | 1004 | 1098 |
| UPI000353BD9F | S4BBS9 | Enterococcus casseliflavus | 1005 | 1099 |
| UPI0001789C0D | D3EED1 | Geobacillus sp. | 1006 | 1100 |
| UPI000260A2FE | 14EYD9 | Modestobacter marinus | 1007 | 1101 |
| UPI00019EF0EE | C6XYM6 | Pedobacter heparinus | 1008 | 1102 |
| UPI00019B5915 | C6VZL3 | Dyadobacter fermentans | 1009 | 1103 |
| UPI000212C156 | F8FQQ3 | Paenibacillus mucilaginosus | 1010 | 1104 |
| UPI0003E2544D | W4D866 | Paenibacillus sp. | 1011 | 1105 |
| UPI000005ADD2 | A0A0P0FM19 | Bacteroides thetaiotaomicron | 1012 | 1106 |
| UPI00005BA60B | A9WDK5 | Chloroflexus aurantiacus | 1013 | 1107 |
| UPI00000B098C | Q9S3L0 | Thermoclostridium stercorarium | 1014 | 1108 |
| UPI0003E5C314 | W4N612 | Bifidobacterium moukalabense | 1015 | 1109 |
| UPI0003AE032C | U2USP4 | Olsenella profusa | 1016 | 1110 |
| UPI00019BDB13 | D2PMT5 | Kribbella flavida | 1017 | 1111 |
| UPI00000C7226 | Q9A9K2 | Caulobacter vibrioides | 1018 | 1112 |
| UPI000005BA09 | Q8A076 | Bacteroides thetaiotaomicron | 1019 | 1113 |
| UPI0003745394 | U5BUY4 | Rhodonellum psychrophilum | 1020 | 1114 |
| UPI0004F6D660 | A0A089M3T2 | Paenibacillus sp. | 1021 | 1115 |
| UPI0003ED860D | W7QMH5 | Catenovulum agarivorans | 1022 | 1116 |
| UPI000217D8B1 | G0L382 | Zobellia galactanivorans | 1023 | 1117 |
| UPI000005B845 | Q8A1H5 | Bacteroides thetaiotaomicron | 1024 | 1118 |
| UPI0001CD02E9 | D6CYE5 | Bacteroides xylanisolvens | 1025 | 1119 |
| UPI00018E07C6 | B8HAH3 | Pseudarthrobacter chlorophenolicus | 1026 | 1120 |
| UPI0001815896 | B5YC64 | Dictyoglomus thermophilum | 1027 | 1121 |
| UPI00039231C1 | T2KPL4 | Formosa agariphila | 1028 | 1122 |
| UPI0000DBA6EB | Q0S9T4 | Rhodococcus jostii | 1029 | 1123 |
| UPI0001D10896 | D5GZ45 | Lactobacillus crispatus | 1030 | 1124 |
| UPI0001B17DE6 | C6XVU2 | Pedobacter heparinus | 1031 | 1125 |
| UPI0001A3C989 | D2QUA5 | Spirosoma linguale | 1032 | 1126 |
| UPI00019EE3EB | C6XU05 | Pedobacter heparinus | 1033 | 1127 |
| UPI0003432C11 | R9ULQ4 | Paenibacillus mucilaginosus | 1034 | 1128 |
| UPI0001BC0C05 | D5VGD9 | Caulobacter segnis | 1035 | 1129 |
| UPI0001969377 | E2N9B1 | Bacteroides cellulosilyticus | 1036 | 1130 |
| UPI0001B17C60 | C6Y153 | Pedobacter heparinus | 1037 | 1131 |
| UPI000571C0C2 | T2KNB2 | Formosa agariphila | 1038 | 1132 |
| UPI00004C6D41 | Q5FJ31 | Lactobacillus acidophilus | 1039 | 1133 |
| UPI00001AC07D | Q7UYD5 | Rhodopirellula baltica | 1040 | 1134 |
| UPI0001BF9A6C | E3IY10 | Frankia inefficax | 1041 | 1135 |
| UPI0001B7FF91 | C9Z376 | Streptomyces scabiei | 1042 | 1136 |
| UPI00006E5F74 | A5FC22 | Flavobacterium johnsoniae | 1043 | 1137 |
| UPI00034E666D | S2YWB5 | Streptomyces sp. | 1044 | 1138 |
| UPI000198DF25 | C1F149 | Acidobacterium capsulatum | 1045 | 1139 |
| UPI0003ED82D3 | W7QYP5 | Catenovulum agarivorans | 1046 | 1140 |
| UPI0001A461B7 | C7MA59 | Brachybacterium faecium | 1047 | 1141 |
| UPI000243A177 | A0A0J9X262 | Klebsiella oxytoca | 1048 | 1142 |
| UPI0001B24769 | C7PA70 | Chitinophaga pinensis | 1049 | 1143 |
| UPI0002BCAF6B | M3FYL9 | Streptomyces bottropensis | 1050 | 1144 |
| UPI0001966B28 | D1PKC7 | Subdoligranulum variabile | 1051 | 1145 |
| UPI0001F8A51D | E8NDD8 | Microbacterium testaceum | 1052 | 1146 |
| UPI000053767B | Q01V09 | Solibacter usitatus | 1053 | 1147 |
| UPI0001A3EFE6 | D2B240 | Streptosporangium roseum | 1054 | 1148 |
| UPI0006CE1E82 | A0A0N1BME3 | alpha proteobacterium | 1055 | 1149 |
| UPI000247229E | H8KPI7 | Solitalea canadensis | 1056 | 1150 |
| UPI0002CB9583 | S0GSF0 | Parabacteroides goldsteinii | 1057 | 1151 |
| UPI00021B9B33 | G0J630 | Cyclobacterium marinum | 1058 | 1152 |
| UPI0000533669 | Q01TX2 | Solibacter usitatus | 1059 | 1153 |
| UPI00032D8F6D | R7ZW70 | Lunatimonas lonarensis | 1060 | 1154 |
| UPI0000D713F2 | Q1M7P3 | Rhizobium leguminosarum | 1061 | 1155 |
| UPI0001A3EBEB | D2AYU9 | Streptosporangium roseum | 1062 | 1156 |
| UPI000156F115 | A6LBL4 | Parabacteroides distasonis | 1063 | 1157 |
| UPI0003375A10 | R9K6L6 | Lachnospiraceae bacterium | 1064 | 1158 |
| UPI0001A2F0FA | C7P9Y8 | Chitinophaga pinensis | 1065 | 1159 |
| UPI0001BC0C15 | D5VGC3 | Caulobacter segnis | 1066 | 1160 |
| UPI00019EF6E1 | C6Y145 | Pedobacter heparinus | 1067 | 1161 |
| UPI00019EE1A9 | C6Y2X3 | Pedobacter heparinus | 1068 | 1162 |
| UPI000C8D4928 | A0A2D5SK32 | Deltaproteobacteria bacterium | 1069 | 1163 |
| UPI00019BFDCE | D1CHL4 | Thermobaculum terrenum | 1070 | 1164 |
| UPI000172B62A | B1ZY35 | Opitutus terrae | 1071 | 1165 |
| UPI00019BFABB | D2PXQ4 | Kribbella flavida | 1072 | 1166 |
| UPI0001B80091 | C9Z391 | Streptomyces scabiei | 1073 | 1167 |
| UPI00023EC5D1 | G8S540 | Actinoplanes sp. | 1074 | 1168 |
| UPI0003C3CD2B | V4NSJ1 | Asticcacaulis sp. | 1075 | 1169 |
| UPI00019BF65D | D2PT74 | Kribbella flavida | 1076 | 1170 |
| UPI00000BC760 | Q93RE7 | Bacillus sp. | 1077 | 1171 |
| UPI00006E5FAB | A5FCG3 | Flavobacterium johnsoniae | 1078 | 1172 |
| UPI00032EEB9C | R7ZS84 | Lunatimonas lonarensis | 1079 | 1173 |
| UPI0004B2D794 | A0A3E3IGR6 | Eisenbergiella massiliensis | 1080 | 1174 |
| UPI0003ED7515 | W7QF25 | Catenovulum agarivorans | 1081 | 1175 |
| UPI0000184198 | Q82PP4 | Streptomyces avermitilis | 1082 | 1176 |

### Experiment 6-1—Screening of Rhamnosidases for Derhamnosylation of Saponins in Treated Bark Extract (2%)

[3024] Synthetic nucleotide sequences corresponding to SEQ ID 989 to 1082 were subcloned, transformed, expressed and lysed in an identical manner to Experiment 4-1 with the exception that a single cell pellet plate was lysed with 200 ul lysis buffer.

[3025] Treated bark extract (TBE) solution was prepared by diluting 1 volume with 9 volumes of 100 mM potassium phosphate pH 7.5. 40 uL clarified lysate was transferred into fresh 96 well PCR plates. 10 uL 10× diluted TBE solution added to each well of lysate to a final concentration of 2% ( 1/50). Plates were incubated at 30 degC with shaking for 18 h. Quenched with 50 uL MeCN+2% AcOH and shaken at room temperature for 10 mins prior to centrifugation (10 min, 4 degC) to remove particulates. Samples were analysed by LCMS/MS using method of Experiment 4-1. The following MS-MS transitions were monitored to observe loss of rhamnose from starting saponins to product derhamnosylated saponins.

| | | Dwell | | Cone | Collision |
|---|---|---|---|---|---|
| | | Time | MRM | Voltage | Energy |
| Component | Mode | (secs) | Transitions | (V) | (v) |
| QS-17 2296 | ESI - | Auto | 1147.52 > 836.40 | 34 | 16 |
| QS-18 2150 | ESI - | Auto | 1074.50 > 836.40 | 34 | 16 |
| desglucosyl- | ESI - | Auto | 1066.49 > 755.33 | 34 | 16 |
| QS-17 2134 | | | | | |
| QS-21 1988 | ESI - | Auto | 993.46 > 755.5 | 34 | 16 |
| QS-17 2310 | ESI - | Auto | 1154.53 > 843.37 | 34 | 16 |
| QS-18 2164 | ESI - | Auto | 1081.50 > 843.37 | 34 | 16 |

[3026] FIGS. 14 to 19 provide exemplary chromatograms following negative control treatment and rhamnosidase SEQ ID No. 1017 treatment.

[3027] Data is expressed as TIC peak area ratio percent (PAR %) for rhamnosylated starting saponin to derhamnosylated product:

$$PAR \% = \frac{100 \times rhamnosylated starting saponin}{\begin{matrix}( rhamnosylated starting saponin + \\ derhamnosylated product saponin )\end{matrix}}$$

[3028] Activity was measured for the removal of the alpha-O-rhamnosylation at the C2 position of the arabinofuranose moiety of QS-17 2296 component to produce QS-18 2150 component; desglucosyl-QS-17 2134 to produce QS-21 1988 component and QS-17 2310 component to produce QS-18 2164.

[3029] No activity was detected for the removal of the C3 saccharide rhamnose as demonstrated by no effect on QS-18 2164 component (QS-18 2164/QS-21 1988 ratio is unchanged). Additionally no endo cleavage of the C28 saccharide rhamnose attached to the C2 position of the fucose was observed.

TABLE 11

| AA Seq | DNA | QS-17 | Peak75 | Peak57 | ratio |
|---|---|---|---|---|---|
| ID | Seq ID | (PAR %) | (PAR %) | (PAR %) | PP/QS-21 |
| 992 | 1086 | 0.000 | 0.000 | 0.000 | 0.20 |
| 1003 | 1097 | 0.000 | 0.000 | 0.000 | 0.19 |
| 1052 | 1146 | 0.000 | 0.000 | 0.000 | 0.16 |
| 1073 | 1167 | 0.007 | 0.000 | 0.000 | 0.18 |
| 1017 | 1111 | 0.017 | 0.000 | 0.004 | 0.19 |
| 1055 | 1149 | 0.019 | 0.000 | 0.000 | 0.19 |
| 1075 | 1169 | 0.043 | 0.000 | 0.000 | 0.18 |
| 1001 | 1095 | 0.075 | 0.137 | 0.000 | 0.19 |
| 1007 | 1101 | 0.104 | 0.043 | 0.009 | 0.19 |
| 1061 | 1155 | 0.245 | 0.230 | 0.029 | 0.19 |
| 1079 | 1173 | 0.315 | 0.247 | 0.000 | 0.18 |
| 1027 | 1121 | 0.324 | 0.094 | 0.053 | 0.19 |
| 1039 | 1133 | 0.492 | 0.683 | 0.000 | 0.18 |
| 1041 | 1135 | 0.507 | 0.000 | 0.000 | 0.16 |
| 989 | 1083 | 0.516 | 0.478 | 0.305 | 0.18 |
| 1053 | 1147 | 1.127 | 0.944 | 0.550 | 0.18 |
| 1018 | 1112 | 1.512 | 2.651 | 0.547 | 0.17 |
| 1066 | 1160 | 2.194 | 1.220 | 0.896 | 0.18 |
| 1082 | 1176 | 3.122 | 1.614 | 0.000 | 0.21 |
| 1076 | 1170 | 3.766 | 1.961 | 1.295 | 0.19 |
| 993 | 1087 | 3.836 | 2.211 | 1.129 | 0.18 |
| 1077 | 1171 | 3.964 | 2.138 | 2.532 | 0.18 |
| 1046 | 1140 | 4.051 | 2.446 | 2.480 | 0.13 |
| 1015 | 1109 | 4.132 | 2.969 | 3.048 | 0.15 |
| 1063 | 1157 | 4.201 | 2.240 | 2.473 | 0.17 |
| 1054 | 1148 | 4.348 | 2.160 | 2.487 | 0.17 |
| 1074 | 1168 | 4.443 | 2.312 | 1.681 | 0.18 |
| 1067 | 1161 | 4.455 | 2.231 | 2.852 | 0.17 |
| 1033 | 1127 | 4.485 | 2.521 | 2.927 | 0.16 |
| 1071 | 1165 | 4.587 | 2.574 | 2.650 | 0.17 |
| 1059 | 1153 | 4.613 | 2.534 | 2.956 | 0.16 |
| 1064 | 1158 | 4.625 | 2.476 | 3.009 | 0.18 |
| 1019 | 1113 | 4.626 | 2.982 | 2.390 | 0.15 |
| 1047 | 1141 | 4.669 | 2.456 | 3.332 | 0.17 |
| 1057 | 1151 | 4.670 | 2.498 | 3.213 | 0.15 |
| 1038 | 1132 | 4.725 | 2.512 | 2.913 | 0.18 |
| 1032 | 1126 | 4.730 | 2.411 | 3.044 | 0.17 |
| 1045 | 1139 | 4.741 | 2.442 | 2.865 | 0.17 |
| 997 | 1091 | 4.754 | 2.115 | 2.906 | 0.17 |
| 1056 | 1150 | 4.774 | 2.416 | 2.796 | 0.17 |
| 996 | 1090 | 4.778 | 2.221 | 3.190 | 0.16 |
| 1069 | 1163 | 4.786 | 2.213 | 2.596 | 0.17 |
| 1080 | 1174 | 4.792 | 2.434 | 2.882 | 0.17 |
| 1010 | 1104 | 4.796 | 2.559 | 2.845 | 0.18 |
| 1035 | 1129 | 4.825 | 2.427 | 2.987 | 0.17 |
| 1034 | 1128 | 4.827 | 2.389 | 3.034 | 0.17 |
| 1036 | 1130 | 4.834 | 2.444 | 2.852 | 0.16 |
| 1008 | 1102 | 4.834 | 2.538 | 2.658 | 0.17 |
| 1042 | 1136 | 4.871 | 2.599 | 3.383 | 0.18 |
| 1016 | 1110 | 4.872 | 2.498 | 3.326 | 0.18 |
| 1023 | 1117 | 4.916 | 2.120 | 2.889 | 0.17 |
| 1062 | 1156 | 4.916 | 2.410 | 2.941 | 0.18 |
| 1002 | 1096 | 4.922 | 2.538 | 2.843 | 0.16 |
| 1029 | 1123 | 4.926 | 2.069 | 3.334 | 0.16 |
| 1037 | 1131 | 4.972 | 2.424 | 2.764 | 0.17 |
| 1048 | 1142 | 5.007 | 2.441 | 2.465 | 0.17 |
| 1000 | 1094 | 5.010 | 2.788 | 3.119 | 0.16 |
| 1065 | 1159 | 5.015 | 2.458 | 3.194 | 0.17 |
| 1020 | 1114 | 5.058 | 2.360 | 3.288 | 0.17 |
| 1012 | 1106 | 5.068 | 2.610 | 3.249 | 0.16 |
| 1004 | 1098 | 5.076 | 2.553 | 2.942 | 0.16 |
| 1028 | 1122 | 5.081 | 2.885 | 1.993 | 0.15 |
| 991 | 1085 | 5.084 | 2.453 | 3.443 | 0.17 |
| 1011 | 1105 | 5.089 | 2.854 | 3.124 | 0.19 |
| 1043 | 1137 | 5.098 | 2.791 | 3.119 | 0.15 |
| 998 | 1092 | 5.111 | 2.402 | 3.326 | 0.15 |
| 1058 | 1152 | 5.121 | 2.398 | 3.144 | 0.17 |
| 990 | 1084 | 5.144 | 2.151 | 0.188 | 0.21 |
| 1024 | 1118 | 5.145 | 2.806 | 2.924 | 0.17 |
| 1060 | 1154 | 5.159 | 2.382 | 2.888 | 0.15 |
| 1005 | 1099 | 5.166 | 2.767 | 2.799 | 0.17 |
| 1070 | 1164 | 5.168 | 2.275 | 3.311 | 0.18 |
| 994 | 1088 | 5.177 | 2.147 | 3.300 | 0.16 |
| 1022 | 1116 | 5.190 | 2.368 | 2.882 | 0.15 |
| 1049 | 1143 | 5.211 | 2.417 | 2.271 | 0.18 |
| 1031 | 1125 | 5.218 | 2.367 | 3.096 | 0.17 |
| 1078 | 1172 | 5.218 | 2.153 | 2.788 | 0.16 |
| 995 | 1089 | 5.223 | 2.545 | 3.002 | 0.17 |
| 1040 | 1134 | 5.244 | 2.372 | 3.084 | 0.18 |
| 1050 | 1144 | 5.251 | 2.528 | 2.305 | 0.17 |
| 1026 | 1120 | 5.271 | 2.501 | 2.755 | 0.17 |
| 1013 | 1107 | 5.272 | 2.388 | 2.576 | 0.17 |
| 1051 | 1145 | 5.289 | 2.426 | 2.918 | 0.16 |
| 1014 | 1108 | 5.309 | 2.741 | 3.359 | 0.18 |
| 1030 | 1124 | 5.315 | 2.127 | 3.621 | 0.17 |
| 1006 | 1100 | 5.339 | 2.645 | 3.237 | 0.18 |
| 1081 | 1175 | 5.348 | 2.473 | 2.624 | 0.17 |
| 1044 | 1138 | 5.370 | 2.274 | 3.156 | 0.16 |
| 1009 | 1103 | 5.408 | 2.379 | 3.762 | 0.16 |
| 1072 | 1166 | 5.457 | 2.462 | 3.245 | 0.17 |
| 1021 | 1115 | 5.476 | 2.296 | 3.148 | 0.16 |
| 1025 | 1119 | 5.495 | 2.330 | 2.933 | 0.18 |
| 1068 | 1162 | 5.521 | 2.370 | 3.156 | 0.17 |
| 999 | 1093 | 5.614 | 2.571 | 2.714 | 0.16 |

| | | | | |
|---|---|---|---|---|
| Negative Control 1 | 4.876 | 2.719 | 3.061 | 0.18 |
| Negative Control 2 | 5.225 | 2.158 | 2.429 | 0.17 |

### Experiment 6-2 Screening of Rhamnosidases for Derhamnosylation of Saponins in Treated Bark Extract (25%)

[3030] A subset of rhamnosidases were expressed and lysed as in the method of experiment 6-1.

[3031] Treated bark extract (TBE) solution was adjusted to pH 7.4 by addition of NaOH (2M). 75 uL clarified lysate was transferred into fresh 96 well PCR plates. 25 uL TBE solution (pH 7.4) was added to each well of lysate to a final concentration of 25%. Plates were incubated at degC with shaking for 19.5 h.

[3032] Quenched with 100 uL MeCN+2% AcOH and shaken at room temperature for 10 mins prior to centrifugation (10 min, 4 degC) to remove particulates. Samples were analysed by UV HPLC using method of Experiment 4-4. Three key peaks of interest are apparent using this chromatography: Left Peak (retention time approximately 2.30-2.35 min) comprising mainly QS-17 family components; Middle Peak (retention time approximately 2.37-2.42 min) comprising mainly QS-18 family components and desglucosyl-QS-17 family components; and Right Peak (retention time approximately 2.44-2.50 min) comprising mainly QS-21 family components. Peak identity was supported by MS/MS.

[3033] Enzyme mediated hydrolysis of the alpha-O-rhamnosylation at the C2 position of the arabinofuranose moiety of QS-17 family components leads to a decrease in Left Peak and an increase in Middle Peak due to formation of QS-18 family components. Enzyme mediated hydrolysis of the alpha-O-rhamnosylation at the C2 position of the arabinofuranose moiety of desglucosyl-QS-17 family components leads to a decrease in Middle Peak and an increase in Right Peak due to formation of QS-21 family components.

[3034] The relative percentage of each peak was determined. A decrease in Left Peak and a concomitant increase in Middle Peak and Right Peak is observed for enzymes active under these conditions. Results for the tested subset of rhamnosidases are provided below in Table 12.

TABLE 12

| AA Seq | DNA | Left | Middle | Right |
|---|---|---|---|---|
| ID | Seq ID | Peak | Peak | Peak |
| 1017 | 1111 | 6% | 63% | 31% |
| 1073 | 1167 | 6% | 62% | 31% |
| 1003 | 1097 | 7% | 63% | 31% |
| 1055 | 1149 | 7% | 62% | 31% |
| 992 | 1086 | 7% | 62% | 31% |
| 1007 | 1101 | 8% | 62% | 30% |
| 1052 | 1146 | 9% | 62% | 30% |
| 1075 | 1169 | 9% | 61% | 30% |
| 1061 | 1155 | 13% | 59% | 28% |
| 1001 | 1095 | 14% | 59% | 27% |
| 1079 | 1173 | 14% | 58% | 28% |
| 1041 | 1135 | 15% | 55% | 30% |
| 1039 | 1133 | 16% | 57% | 27% |
| 993 | 1087 | 18% | 56% | 27% |
| 1027 | 1121 | 18% | 55% | 27% |
| 1082 | 1176 | 19% | 55% | 26% |
| 989 | 1083 | 19% | 54% | 26% |
| 1053 | 1147 | 20% | 54% | 26% |
| 1066 | 1160 | 20% | 53% | 27% |
| 1018 | 1112 | 22% | 52% | 26% |
| 1076 | 1170 | 22% | 52% | 26% |
| 990 | 1084 | 23% | 51% | 26% |
| 1077 | 1171 | 23% | 51% | 26% |

| | | | |
|---|---|---|---|
| Negative control | 24% | 50% | 26% |

[3035] Example UV HPLC chromatograms are shown in FIG. 20 for SEQ ID No. 1017 treatment and negative control.

### Experiment 6-3 Screening of Rhamnosidases for Derhamnosylation of Saponins in Crude Bark Extract (80%)

[3036] Selected variants were expressed and lysed as in the method of experiment 6-1.

[3037] Crude bark extract (CBE) solution was adjusted to pH 7.4 by addition of NaOH (2M). 20 uL clarified lysate was transferred into fresh 96 well PCR plates. 80 uL CBE solution (pH 7.4) was added to each well of lysate to a final concentration of 80%. Plates were incubated at 30 degC with shaking for 19.5 h.

[3038] Quenched with 100 uL MeCN+2% AcOH and shaken at room temperature for 10 mins prior to centrifugation (10 min, 4 degC) to remove particulates. Samples were analysed by UV HPLC using method of Experiment 4-4.

[3039] Three key peaks of interest are apparent using this chromatography: Left Peak (retention time approximately 2.30-2.35 min) comprising mainly QS-17 family components; Middle Peak (retention time approximately 2.37-2.42 min) comprising mainly QS-18 family components and desglucosyl-QS-17 family components; and Right Peak (retention time approximately 2.44-2.50 min) comprising mainly QS-21 family components. Peak identity was supported by MS/MS.

[3040] Enzyme mediated hydrolysis of the alpha-O-rhamnosylation at the C2 position of the arabinofuranose moiety of QS-17 family components leads to a decrease in Left Peak and an increase in Middle Peak due to formation of QS-18 family components. Enzyme mediated hydrolysis of the alpha-O-rhamnosylation at the C2 position of the arabinofuranose moiety of desglucosyl-QS-17 family components leads to a decrease in Middle Peak and an increase in Right Peak due to formation of QS-21 family components.

[3041] The relative percentage of each peak was determined. A decrease in Left Peak and a concomitant increase in Middle Peak and Right Peak is observed for enzymes active under these conditions. Results for the tested subset of rhamnosidases are provided below in Table 13:

TABLE 13

| AA Seq | DNA | Left | Middle | Right |
|---|---|---|---|---|
| ID | Seq ID | Peak | Peak | Peak |
| 1017 | 1111 | 17% | 56% | 27% |
| 1073 | 1167 | 20% | 52% | 28% |
| 992 | 1086 | 21% | 49% | 30% |
| 1007 | 1101 | 24% | 49% | 27% |
| 1052 | 1146 | 25% | 49% | 27% |
| 1079 | 1173 | 25% | 48% | 27% |
| 993 | 1087 | 25% | 49% | 26% |
| 1041 | 1135 | 25% | 48% | 27% |
| 1055 | 1149 | 25% | 48% | 27% |
| 1039 | 1133 | 25% | 48% | 27% |
| 990 | 1084 | 25% | 47% | 28% |
| 1061 | 1155 | 26% | 48% | 27% |
| 1053 | 1147 | 26% | 48% | 26% |
| 1027 | 1121 | 26% | 48% | 26% |
| 1076 | 1170 | 26% | 48% | 27% |
| 1066 | 1160 | 26% | 48% | 27% |
| 1018 | 1112 | 26% | 48% | 26% |
| 1075 | 1169 | 26% | 47% | 27% |
| 1077 | 1171 | 26% | 48% | 27% |
| 1082 | 1176 | 26% | 47% | 27% |
| 1003 | 1097 | 27% | 47% | 26% |
| 989 | 1083 | 29% | 43% | 27% |
| 1001 | 1095 | 31% | 45% | 24% |

| | | | |
|---|---|---|---|
| Negative control | 27% | 48% | 26% |

[3042] Example UV HPLC chromatograms are shown in FIG. 21 for SEQ ID No. 1017 treatment and negative control.

[3043] Based on detection of QS-17 2296, QS-17 2310, QS-18 2150, QS-18 2164, desglucosyl-QS-17 2134 and QS-21 1988 components by LCMS/MS (Example 6-1) or UV HPLC quantification of QS-17, QS-18 and QS-21 peaks (Examples 6-2 and 6-3), Example 6 shows that a number of rhamnosidases could be identified by screening a set of candidate enzymes (29 from 94, 31% achieving a QS-17 PAR % of 4.5 or less in Example 6-1). Rhamnosidases were capable of converting QS-17 family components to QS-18 family components and desglucosyl-QS-17 family components to QS-21 family components at a range of concentrations of starting materials and purity of starting materials.

[3044] Again, although certain candidate enzymes did not demonstrate notable conversion under the conditions tested, this may be due to issues with enzyme expression, suitability of conditions (i.e. enzymes may function under other conditions) or a fundamental lack of required enzyme activity.

### Example 7—Deglucosylation and Derhamnosylation of Saponins in Crude Bark Extract (50%)

### Method

[3045] E. coli cells expressing glucosidase SEQ ID No. 262 (as His-tagged enzyme, DNA SEQ ID No. 662) and separately rhamnosidase SEQ_ID No. 1017 (as His-tagged form, DNA SEQ ID No. 1111) were grown in a fermenter, isolated, lysed, clarified and the resulting lysate lyophilised to yield powder containing each of the expressed enzymes.

[3046] 500 uL CBE was mixed with 500 uL volume sodium acetate buffer (50 mM, pH 6) containing 30 g/L lyophilised powder containing the glucosidase, and 3 g/L lyophilised powder containing the rhamnosidase, and incubated at 37 degC for 24 hours.

[3047] The reaction was quenched by the addition of an equal volume of MeOH and analysed by LC-MS/MS using the method of Experiment 4-1 monitoring the transitions in the table below

TABLE 14

| Component | MRM Transitions |
|---|---|
| QS-18 2150 | 1074.49 > 836.355 |
| QS-18 2164 | 1081.495 > 843.365 |
| QS-17 2296 | 1147.515 > 836.355 |
| QS-17 2310 | 1154.525 > 843.365 |
| QS-21 1988 | 993.46 > 755.33 |
| QS-21 2002 | 1000.47 > 762.34 |
| desarabinofuranosyl-QS-18 2018 | 1008.465 > 836.355 |
| desglucosyl-QS-17 2134 | 1066.49 > 755.33 |

### Results

[3048] FIG. 22 provides exemplary LCMS/MS chromatograms for QS-21 1988 component content at TO (Panel A) and at 24 hrs (Panel B). Results for all components monitored are summarised below:

TABLE 15

| | Peak area | Percent change |
|---|---|---|
| Component | at 24 h | at 24 h |
| QS-18 2150 | 1621 | −80% |
| QS-18 2164 | 95 | −94% |
| QS-17 2296 | 0 | −100% |
| QS-17 2310 | 0 | −100% |
| QS-21 1988 | 8215 | 133% |
| QS-21 2002 | 1359 | 266% |
| desarabinofuranosyl-QS-18 2018 | 6 | −79% |
| desglucosyl-QS-17 2134 | 0 | −100% |

[3049] Components possessing alpha-O-rhamnosylation at the C2 position of the arabinofuranose moiety are reduced below the detection limit while components possessing a glucose moiety show >78% reduction after treatment for 24 h. The corresponding products of selective rhamnose and glucose hydrolysis show substantial increases.

### Example 8—Screening of Glucosidase Variants for Deglycosylation of Saponins in Crude Bark Extract

### Method

[3050] Libraries of genetic variants encoding mutations in the wild type Modestobacter marinus glucosidase (SEQ ID No. 262) were prepared using molecular biology techniques, enzymes were prepared linked to an N-terminally located His-tag. Single monoclonal colonies were grown in 400 ul of expression medium and protein expressed. Cell pellets were lysed in 200 ul of the relevant buffer (Table 16)

[3051] Lysate was diluted appropriately in the relevant buffer to allow a lysate loading of the indicated % loading (1% loading corresponds to use of 2 ul original lysate in a 200 ul reaction). In some experiments a rhamnosidase was also present during the screening reaction (and also in controls, negating any impact on results).

[3052] Crude bark extract (CBE) obtained by aqueous extraction of Quillaja saponaria and containing at least 2.80 mg/ml QS-21 (by HPLC-UV). The pH of CBE was adjusted to pH 6 by dropwise addition of 2M NaOH with stirring. The relevant concentration of the relevant glucosidase was added. The appropriate relative volume of pH 6 CBE (160 ul (for 80%) or 150 ul (for 75%)) was added to each well of the reaction plate. The reaction plate was sealed and incubated at the relevant temperature with shaking overnight for between 18 and 22 hours.

[3053] The reaction plate was quenched by adding 200 uL of MeCN (2% AcOH, 1 mg/mL hexanophenone) to each well of the plates. The quenched reaction plate was re-sealed and incubated at 20 deg C. with shaking for 10 min. The reaction plate was then centrifuged (10 min, 4 degC).

[3054] 200 uL was transferred from each well of the quenched plate to the corresponding wells of a fresh 96 well plate and sealed. The plate was analysed by UV HPLC with the method below:

[3055] UV Method EM2020N435545v2_2

| Column details | ACQUITY UPLC BEH C18 Column, | | |
|---|---|---|---|
| | 130 Å, 1.7 μm, 2.1 mm × 50 mm | | |
| Column temperature | 40° C. | | |
| Mobile phase A | 0.05% v/v TFA in Water HPLC | | |
| Mobile phase B | 0.05% v/v TFA in Acetonitrile HPLC | | |
| Flow rate | 1 mL per minute | | |
| | Time | % Mobile | % Mobile |
| | (mins) | Phase A | Phase B |
| Gradient profile | 0.0 | 60 | 40 |
| 5.5 min gradient | 1.0 | 60 | 40 |
| | 2.1 | 5 | 95 |
| | 2.6 | 5 | 95 |
| | 2.7 | 60 | 40 |
| | 3.5 | 60 | 40 |

| | |
|---|---|
| Detector type | UV detector: DAD or VWD |
| Detector wavelength | 214 nm |
| Agilent DAD 1260 | 4.0 nm (default setting) |
| and 1290 Bandwidth | |
| Agilent 1290 and 1260 | Off |
| DAD reference wavelength | |
| Injection volume | Default injection volume used is 1 ul |

[3056] A negative control (a lysate not expressing test enzymes) and a positive control (expressing the parent comparator—wild type or previous variant as appropriate). Fold improvement over parent (FIOP) for the glucosidase (shorter method) is calculated as follows:

% right peak=100*right peak area/(right peak area+left peak area)

[3057] Average % right peak area is calculated for negative controls (per plate) and subtracted from all wells to give the increase in % right peak for each well above average negative control Average increase in % right peak is calculated for positive controls per plate

FIOP=observed increase in % right peak divided by average positive control increase

### Results

[3058] FIG. 23 provides illustrative chromatograms following treatment of CBE with enzymes and for a negative control.

TABLE 16

| | Mutations cf | Screen | | Lysate | CBE | | | Cumulative | |
|---|---|---|---|---|---|---|---|---|---|
| Enzyme | untagged WT | temp | pH | loading | loading | Buffer | FIOP | FIOP (cf WT) | Rham |
| WT | n/a | 35 | 6 | 20% | 80% | 100 mM | 1 | 1 | None |
| (SEQ ID | | | | | | Potassium | | | |
| No. 262) | | | | | | phosphate | | | |
| G1 | T365N | 35 | 6 | 20% | 80% | 100 mM | 5 | 5 | None |
| (SEQ ID | | | | | | Potassium | | | |
| No. 1179) | | | | | | phosphate | | | |
| G2 | T365N, | 20 | 6 | 10% | 80% | 100 mM | 10 | 50 | None |
| (SEQ ID | R357M, | | | | | Potassium | | | |
| No. 1180) | A473F, | | | | | phosphate | | | |
| | L474C, I475F | | | | | | | | |
| G3 | T365N, | 20 | 6 | 2.50% | 80% | 100 mM | 2.5 | 125 | Present |
| (SEQ ID | R357M, | | | | | Potassium | | | |
| No. 1181) | A473F, L474C, | | | | | phosphate | | | |
| | I475F, F44Y, | | | | | | | | |
| | F442Q | | | | | | | | |
| G4 | T365N, | 35 | 6 | 0.28% | 75% | 100 mM | 2.4 | 300 | Present |
| (SEQ ID | R357M, | | | | | Sodium | | | |
| No. 1182) | A473F, L474C, | | | | | acetate | | | |
| | I475F, F44Y, | | | | | | | | |
| | F442Q, | | | | | | | | |
| | V263L, F5411 | | | | | | | | |
| G5 | F44Y, V263L, | 35 | 6 | 0.14% | 75% | 100 mM | 3 | 900 | Present |
| (SEQ ID | R357M, | | | | | Sodium | | | |
| No. 1183) | T365N, | | | | | acetate | | | |
| | F442Q, | | | | | | | | |
| | L474C, I475F, | | | | | | | | |
| | F5411, A355W, | | | | | | | | |
| | L367C, Q396R | | | | | | | | |

TBD—to be determined
FIOP—fold improvement over parent (i.e. preceding enzyme), Cumulative FIOP is the product of preceding rounds and is nominally the fold improvement over the original wild-type (WT) starting point (however, since conditions change between rounds and WT isn't used as a control Cumulative FIOP is not a direct measure but an estimate).

[3059] The following mutations were associated with enzymes demonstrating improved activity in at least one instance:
[3060] F44Y;
[3061] V60L;
[3062] G117A;
[3063] F170N;
[3064] V263G or V263L;
[3065] N351H or N351Q;
[3066] A355H, A355I, A355L, A355M, A355R, A355T or A355W;
[3067] A356P;
[3068] R357A, R357C, R357K, R357M or R357Q;
[3069] G362C;
[3070] T365A, T365N or T365S;
[3071] L367C;
[3072] V394R;
[3073] V395Y;
[3074] Q396E, Q396G, Q396N, Q396P, Q396R, Q396S or Q396Y;
[3075] F430W;
[3076] R435F;
[3077] V438T;
[3078] V440F;
[3079] F442M or F442Q;
[3080] G444T;
[3081] A473F or A473R;
[3082] L474C, L474I or L474V;
[3083] I475F;
[3084] L492C, L492G, L492H, L492I, L492N, L492Q, L492V, L492W or L492Y;
[3085] Q493F or Q493H;
[3086] P494H or P494I;
[3087] S495I, S495K or S495Q;
[3088] G496P or G496W;
[3089] D498A, D498E, D498F, D498I, D498K, D498L, D498N, D498P, D498R, D498S, D498T or D498V;
[3090] A502R;
[3091] M504G or M504R;
[3092] L507A or L507R;
[3093] T508M;
[3094] L529M;
[3095] F535P;
[3096] A536D or A536E;
[3097] A537R;
[3098] F541A, F541I, F541L, F541M or F541V;
[3099] L542I;
[3100] Q543G or Q543L;
[3101] E547L; and
[3102] Y585W.

### Example 9—Screening of Rhamnosidase Variants for Derhamnosylation of Saponins in Crude Bark Extract

### Method

[3103] Libraries of genetic variants encoding mutations in the wild type Kribbella flavida rhamnosidase (SEQ ID No. 1017) were prepared using molecular biology techniques, enzymes were prepared linked to a C-terminally located His-tag. Single monoclonal colonies were grown in 400 ul of expression medium and protein expressed. Cell pellets were lysed in 200 ul of the relevant buffer (Table 17).

[3104] Lysate was diluted appropriately in the relevant buffer to allow a lysate loading of the indicated % loading (1% loading corresponds to use of 2 ul original lysate in a 200 ul reaction).

[3105] Crude bark extract (CBE) obtained by aqueous extraction of Quillaja saponaria and containing at least 2.80 mg/ml QS-21 (by HPLC-UV) was adjusted to pH 6 by dropwise addition of 2M NaOH with stirring. The relevant concentration of the relevant glucosidase was added. The appropriate relative volume of pH 6 CBE (160 ul (for 80%) or 150 ul (for 75%)) was added to each well of the reaction plate. The reaction plate was sealed and incubated at the relevant temperature and time.

[3106] The reaction plate was quenched by adding 200 uL of MeCN (2% AcOH, 1 mg/mL hexanophenone) to each well of the plates. The quenched reaction plate was re-sealed and incubated at 20 deg C. with shaking for 10 min. The reaction plate was then centrifuged (10 min, 4 degC).

[3107] 200 uL was transferred from each well of the quenched plate to the corresponding wells of a fresh 96 well plate and sealed. The plate was analysed by UV HPLC with the method described in Example 4.

[3108] Three key peaks of interest are apparent using this chromatography: Left Peak (retention time approximately 2.30-2.35 min) comprising mainly QS-17 family components; Middle Peak (retention time approximately 2.37-2.42 min) comprising mainly QS-18 family components and desglucosyl-QS-17 family components; and Right Peak (retention time approximately 2.44-2.50 min) comprising mainly QS-21 family components. Peak identity was supported by MS/MS.

[3109] Enzyme activity is calculated as the % conversion of the Left Peak present in the crude bark extract:

$$\% conversion = 100 \times \frac{( \% Right Peak )}{( \% Left Peak + \% Right Peak )}$$

$$where$$

$$\% Right = \frac{100 \times Right Peak area}{( Right peak area + Left Peak area + Middle Peak area )}$$

[3110] FIG. 24 provides illustrative chromatograms following enzyme treatment of CBE and for a negative control.

TABLE 17

| | | | Conc of | Diluted | | CBE | |
|---|---|---|---|---|---|---|---|
| | | | lysate in | Lysate | Conc CBE | solution | |
| | Temp | Time | reaction | volume | reaction | volume | |
| Enzyme | (deg C.) | (hours) | (% v/v) | (uL) | (% v/v) | (uL) | Buffer |
| R1 | 20 | 22 | 1.25 | 40 | 80 | 160 | 100 mM Potassium |
| (SEQ ID | | | | | | | phosphate pH 6 |
| No. 1189) | | | | | | | |
| R2 | 20 | 20 | 1.25 | 40 | 80 | 160 | 100 mM Potassium |
| (SEQ ID | | | | | | | phosphate pH 6 |
| No. 1190) | | | | | | | |
| R3 | 35 | 18 | 0.4 | 50 | 75 | 150 | 100 mM Sodium |
| (SEQ ID | | | | | | | acetate pH 5.8 |
| No. 1191) | | | | | | | |
| R4 | 35 | 18 | 0.125 | 50 | 75 | 150 | 100 mM Sodium |
| (SEQ ID | | | | | | | acetate pH 5.8 |
| No. 1192) | | | | | | | |
| R5 | 35 | 18 | 0.0625 | 50 | 75 | 150 | 100 mM Sodium |
| (SEQ ID | | | | | | | acetate pH 5.8 |
| No. 1193) | | | | | | | |

R1 (SEQ ID No. 1189)—K219G
R2 (SEQ ID No. 1190)—A143P, L214M, K219G, Q921H;
R3 (SEQ ID No. 1191)—A143P, L214M, K219G, G357C, Q921H
R4 (SEQ ID No. 1192)—A143P, L214M, G215S, G218N, K219G, G357C, G508S, G634A, Q921H
R5 (SEQ ID No. 1193)—A143P, L214M, G215S, G218D, K219G, G357C, G508S, G634A, A690C, Q921H

### Results

TABLE 18

| | | | | | | % conversion | FIOP (% | |
|---|---|---|---|---|---|---|---|---|
| | | | | | % conversion | (Right peak/ | area increase | Cumulative |
| | | Left | Middle | Right | (Right peak/ | Left Peak) | variant/pos | FIOP from |
| Enzyme | Treatment | Peak % | Peak % | Peak % | Left Peak) | (−neg control) | control) | WT |
| R1 | R1 | 27.04 | 45.89 | 27.08 | 50.04 | 2.74 | 1.7 | 1.7 |
| | Negative | 29.36 | 44.30 | 26.35 | 47.30 | 0.00 | | |
| | control | | | | | | | |
| | Positive | 27.94 | 45.30 | 26.76 | 48.92 | 1.62 | | |
| | control | | | | | | | |
| | (WT) | | | | | | | |
| R2 | R2 | 22.76 | 50.97 | 26.27 | 53.57 | 1.09 | 2.9 | 2.9 |
| | Negative | 23.63 | 50.27 | 26.10 | 52.49 | 0.00 | | |
| | control | | | | | | | |
| | Positive | 23.31 | 50.55 | 26.14 | 52.86 | 0.38 | | |
| | control | | | | | | | |
| | (WT) | | | | | | | |
| R3 | R3 | 18.85 | 51.70 | 29.45 | 60.97 | 13.06 | 3.3 | 9.4 |
| | Negative | 28.91 | 44.49 | 26.60 | 47.91 | 0.00 | | |
| | control | | | | | | | |
| | Positive | 25.57 | 46.84 | 27.59 | 51.90 | 3.99 | | |
| | control | | | | | | | |
| | (R2) | | | | | | | |
| R4 | R4 | 25.03 | 47.96 | 27.00 | 51.89 | 5.06 | 2.3 | 22.1 |
| | Negative | 29.62 | 44.29 | 26.09 | 46.84 | 0.00 | | |
| | control | | | | | | | |
| | Positive | 27.65 | 45.79 | 26.56 | 49.00 | 2.16 | | |
| | control | | | | | | | |
| | (R3) | | | | | | | |
| R5 | R5 | 26.59 | 46.48 | 26.93 | 50.32 | 2.62 | 1.3 | 28.7 |
| | Negative | 28.76 | 45.00 | 26.23 | 47.70 | 0.00 | | |
| | control | | | | | | | |
| | Positive | 27.09 | 46.12 | 26.79 | 49.72 | 2.02 | | |
| | control | | | | | | | |
| | (R4) | | | | | | | |

FIOP—fold improvement over parent (i.e. preceding enzyme), Cumulative FIOP is the product of preceding rounds and is nominally the fold improvement over the original WT starting point (however, since conditions change between rounds and WT isn't used as a control Cumulative FIOP is not a direct measure but an estimate).

[3112] The following mutations were associated with enzymes demonstrating improved activity in at least one instance:
[3113] (i) A56C
[3114] (ii) A143P
[3115] (iii) Q181H, Q181R or Q181S
[3116] (iv) L214M
[3117] (v) G215S
[3118] (vi) F216M
[3119] (vii) G218D or G218N
[3120] (viii) K219G
[3121] (ix) A238M
[3122] (x) T252Y
[3123] (xi) T311W
[3124] (xii) V326C
[3125] (xiii) G357C
[3126] (xiv) S369C, S369I, S369K or S369M
[3127] (xv) I487M, I487Q or I487V
[3128] (xvi) K492N
[3129] (xvii) V499T
[3130] (xviii) G508S
[3131] (xix) R543C
[3132] (xx) L557Y
[3133] (xxi) G634A
[3134] (xxii) S635N
[3135] (xxiii) A690C and
[3136] (xxiv) Q921H.

### Example 10—Deglucosylation and Derhamnosylation of Saponins in Crude Bark Extract (50%) Using Engineered Enzymes

### Method

[3137] Lyophilised powders from clarified cell lysate expressing glucosidases (from Example 8 WT glucosidase and engineered glucosidase polypeptides G1 to G5) and rhamnosidases (from Example 9 WT rhamnosidase and engineered rhamnosidase polypeptides R1 to R5) were dissolved in 200 mM sodium acetate aqueous solution at pH 5.8 to prepare the enzyme solutions at 4 fold the final reaction concentration as shown in Tables 19 and 20.

[3138] Each glucosidase solution was combined with an equal volume of 200 mM sodium acetate aqueous solution at pH 5.8 and separately with an equal volume of 200 mM sodium acetate aqueous solution at pH 5.8 containing 2 mg/ml rhamnosidase R5. This is a sufficient loading of rhamnosidase to effect complete hydrolysis of the relevant rhamnose moiety within 4 hours.

[3139] Each rhamnosidase solution was combined with an equal volume of 200 mM sodium acetate aqueous solution at pH 5.8 and separately with an equal volume of 200 mM sodium acetate aqueous solution at pH 5.8 containing 2 mg/ml glucosidase G5. This is a sufficient loading of glucosidase to effect complete hydrolysis of the relevant glucose moiety within 4 hours.

[3140] CBE was adjusted to pH of 6.0 to 6.2 with 2M sodium hydroxide and an equal volume added to the enzyme solution to prepare the reaction mix (i.e. 50% CBE concentration in reaction mix) and the concentration of glucosidase and/or rhamnosidase is shown in Tables 19 and 20. The reaction mix was heated to 35 degC for the time indicated in Tables 19 and 20, after which the reaction was quenched by addition of an equal volume of MeCN containing 2% acetic acid and shaken at room temperature for 10 mins prior to centrifugation (10 min, 4 degC) to remove particulates. Samples were analysed by UV HPLC using method of Experiment 4-4.

[3141] Results

[3142] The change in composition of the Left, Middle and Right peaks is shown in in Tables 19 and 20. The composition changes by the action of the enzymes depending on the presence or absence of the partner enzyme. The extent of reaction is proportional to the enzyme concentration and the reaction time under these conditions. The tables show data for enzyme concentrations and the reaction times providing for equivalent extents of reaction. The improvement resulting from the mutations introduced for each variant is equal to the fold change in enzyme concentration×time (i.e. fold improvement=(enzyme concentration×time) for preceding variant÷(enzyme concentration×time) for later variant). A cumulative fold improvement over the original enzyme variant is calculated by the product of the individual fold improvements. The glucosidase G5 shows approximately 800 fold improvement over WT glucosidase. The rhamnosidase R5 shows approximately 30 fold improvement over WT rhamnosidase.

[3143] Variants G5 and R5 were found to demonstrate activity across a range of reaction conditions from 25 degC to 40 degC, from pH 5 to 7 (maintaining >80% relative activity for pH 5.4 to 6.2, and >50% for pH 5.2 to 7), and with a range of CBE loadings to at least 150% (achieved by redissolving lyophilised CBE in a smaller volume).

TABLE 19

| | | | | | | | | | | | | |
|---|---|---|---|---|---|---|---|---|---|---|---|---|
| | | | | | | | | | % | | | Cumulative |
| | | Rham- | | | | | | % | change | % | Fold | Fold |
| | Glucosidase | nosidase | | | % | % | % | change | in | change | improvement in | improvement in |
| | conc | conc | Rham- | Time | Left | Middle | Right | in Left | Middle | in Right | primary enzyme | primary enzyme |
| Glucosidase | (mg/ml) | (mg/ml) | nosidase | (h) | Peak | Peak | Peak | Peak | Peak | Peak | loading × time | loading × time |

| | | | |
|---|---|---|---|
| Starting CBE (untreated) | 30 | 44 | 26 |

Glucosidase in the absence of Rhamnosidase

| | | | | | | | | | | | | |
|---|---|---|---|---|---|---|---|---|---|---|---|---|
| WT | 50 | 0 | — | 7 | 23 | 24 | 52 | −22% | −45% | 201% | 1 | 1 |
| G1 | 6.25 | 0 | — | 7 | 28 | 18 | 54 | −8% | −59% | 209% | 8.0 | 8 |
| G2 | 1.56 | 0 | — | 7 | 26 | 19 | 55 | −15% | −57% | 213% | 4.0 | 32 |
| G3 | 0.78 | 0 | — | 7 | 24 | 22 | 53 | −19% | −50% | 206% | 2.0 | 64 |
| G4 | 0.39 | 0 | — | 7 | 23 | 23 | 54 | −22% | −49% | 208% | 2.0 | 128 |
| G5 | 0.1 | 0 | — | 4 | 27 | 19 | 54 | −11% | −56% | 208% | 6.5 | 834 |

Glucosidase in the presence of Rhamnosidase

| | | | | | | | | | | | | |
|---|---|---|---|---|---|---|---|---|---|---|---|---|
| WT | 50 | 0.5 | R5 | 7 | 16 | 16 | 68 | −45% | −64% | 261% | 1 | 1 |
| G1 | 6.25 | 0.5 | R5 | 7 | 18 | 16 | 66 | −39% | −64% | 253% | 8.0 | 8 |
| G2 | 1.56 | 0.5 | R5 | 7 | 22 | 8 | 70 | −26% | −82% | 269% | 4.0 | 32 |
| G3 | 0.78 | 0.5 | R5 | 7 | 21 | 9 | 70 | −31% | −79% | 270% | 2.0 | 64 |
| G4 | 0.39 | 0.5 | R5 | 7 | 22 | 9 | 69 | −28% | −79% | 267% | 2.0 | 128 |
| G5 | 0.1 | 0.5 | R5 | 4 | 20 | 7 | 73 | −34% | −83% | 280% | 6.5 | 834 |

TABLE 20

| | | | | | | | | | | | | |
|---|---|---|---|---|---|---|---|---|---|---|---|---|
| | | | | | | | | | % | | | Cumulative |
| | | Rham- | | | | | | % | change | % | Fold | Fold |
| | Glucosidase | nosidase | | | % | % | % | change | in | change | improvement in | improvement in |
| | conc | conc | Rham- | Time | Left | Middle | Right | in Left | Middle | in Right | primary enzyme | primary enzyme |
| Glucosidase | (mg/ml) | (mg/ml) | nosidase | (h) | Peak | Peak | Peak | Peak | Peak | Peak | loading × time | loading × time |

| | | | |
|---|---|---|---|
| Starting CBE (untreated) | 30 | 44 | 26 |

Rhamnosidase in the absence of Glucosidase

| | | | | | | | | | | | | |
|---|---|---|---|---|---|---|---|---|---|---|---|---|
| — | 0 | 5 | WT | 7 | 18 | 52 | 30 | −40% | 17% | 117% | 1 | 1 |
| — | 0 | 2.5 | R1 | 7 | 19 | 51 | 29 | −35% | 17% | 112% | 2.0 | 2 |
| — | 0 | 1.25 | R2 | 7 | 18 | 52 | 29 | −39% | 19% | 113% | 2.0 | 4 |
| — | 0 | 0.63 | R3 | 7 | 16 | 53 | 30 | −45% | 21% | 116% | 2.0 | 8 |
| — | 0 | 0.31 | R4 | 7 | 16 | 54 | 30 | −45% | 22% | 115% | 2.0 | 16 |
| — | 0 | 0.16 | R5 | 7 | 17 | 56 | 28 | −45% | 27% | 106% | 1.9 | 31 |

Rhamnosidase in the presence of Glucosidase

| | | | | | | | | | | | | |
|---|---|---|---|---|---|---|---|---|---|---|---|---|
| G5 | 0.5 | 5 | WT | 7 | 18 | 3 | 80 | −41% | −94% | 306% | 1 | 1 |
| G5 | 0.5 | 2.5 | R1 | 7 | 18 | 2 | 80 | −40% | −96% | 309% | 2.0 | 2 |
| G5 | 0.5 | 1.25 | R2 | 7 | 18 | 2 | 80 | −40% | −96% | 309% | 2.0 | 4 |
| G5 | 0.5 | 0.63 | R3 | 7 | 19 | 0 | 81 | −38% | −99% | 311% | 2.0 | 8 |
| G5 | 0.5 | 0.31 | R4 | 7 | 17 | 3 | 79 | −42% | −93% | 306% | 2.0 | 16 |
| G5 | 0.5 | 0.31 | R5 | 4 | 20 | 3 | 77 | −34% | −93% | 296% | 1.7 | 27 |

### Example 11—Deglucosylation and Derhamnosylation of Saponins in Crude Bark Extract (50%) Using Engineered Enzymes

### Method

[3144] Lyophilised powders from clarified cell lysate expressing engineered glucosidase polypeptide G3 from Example 8 and engineered rhamnosidase polypeptide R2 were dissolved in 200 mM sodium acetate aqueous solution at pH 5.8 to a concentration of 3 g/L (glucosidase) and 2 g/L (rhamnosidase). For a 1 L reaction, sodium acetate buffer 200 mM (700 mL) was charged to a stirred reactor. Under constant agitation, glucosidase enzyme powder (2.1 g) and rhamnosidase enzyme powder (1.4 g) were added and agitated for 30 mins until all the enzyme powder was suspended. The resulting enzyme solution (700 mL) was depth filtered (nom. 3-9 μm) and then sterile filtered (0.2 μm).

[3145] CBE (700 mL) containing 4.1 g/L QS-21, with a Preceding Peak ratio of 0.25 and a 2018/QS-21 ratio of 0.054 to 0.057 was depth filtered and then sterile filtered (0.2 μm).

[3146] Filtered CBE (500 mL) was charged to a stirred reactor, heated to 37 degC and the pH adjusted to pH of 6.0 to 6.2 with 2M sodium hydroxide. Enzyme solution (500 mL) was then charged to the reactor and the solution stirred at 37 degC for 5 hours.

[3147] After 5 hours glacial acetic acid was charged into the reaction mixture gradually under moderate agitation to adjust the pH to ˜pH3.8 (target range pH3.5 to 4.0).

[3148] The enzyme treated CBE was then purified analogously to the processes provided in Example 3.

### Results

[3149] The purified saponin extract was determined to contain at least 98% QS-21 group, at least 93% QS-21 main peak, 0.2% 2018 component, 1% or less of largest peak outside the QS-21 group by UV absorbance at 214 nm and wherein the monoisotope of the most abundant species was 1987.9 m/z.

[3150] The increase of QS-21 by mass, based on the QS-21 concentration and the sample volumes, shows a 2.6-3.0× increase in the enzyme treated CBE. The increase of % QS-21 (as % of saponins) showed a 3.0-3.1× increase.

[3151] Due to the improved saponin profile of the enzyme treated material a greater recovery yield is obtained while remaining within desired specifications (notably during polystyrene and phenyl resin chromatography where a greater proportion of QS-21 can be recovered). Overall dual enzyme treatment was found to result in approx. 5.2- to 5.3-fold increase in yield compared to a conventional (non-enzyme treated) process.

[3152] FIG. 25 provides an example HPLC-UV chromatogram of untreated and enzyme treated CBE.

[3153] FIG. 26 (full acquisition) and FIG. 27 (zoom) provide example UPLC-UV chromatograms of purified material obtained from untreated and enzyme treated CBE.

### BIBLIOGRAPHY

[3154] Altschul S. et al. Basic local alignment search tool Journal of Molecular Biology 1990 215:403-410
[3155] Altschul S. et al. Gapped BLAST and PSI-BLAST: a new generation of protein database search programs Nucleic Acids Research 1997 3389-3402
[3156] Bomford R. et al. Adjuvanticity and ISCOM formation by structurally diverse saponins Vaccine 1992 10(9):572-577
[3157] Cibulski S. et al. Leaf saponins of Quillaja brasiliensis enhance long-term specific immune responses and promote dose-sparing effect in BVDV experimental vaccines Vaccine 2018
[3158] 36:55-65

[3159] Cleland J. et al. Isomerization and Formulation Stability of the Vaccine Adjuvant QS-21 Journal of Pharmaceutical Sciences 1996 85(1):22-28
[3160] Dalsgaard K. et al. in 1974 (“Saponin adjuvants”, Archiv. für die gesamte Virusforschung, Vol. 44, Springer Verlag, Berlin, p243-254)
[3161] De Becker G. et al. The adjuvant monophosphoryl lipid A increases the function of antigen-presenting cells International Immunology 2000 12:807-815
[3162] Didierlaurent A. M. et al. Enhancement of Adaptive Immunity by the Human Vaccine Adjuvant AS01 Depends on Activated Dendritic Cells Journal of Immunology 2014 193(4):1920-1930
[3163] Didierlaurent A. M. et al. Adjuvant system AS01: helping to overcome the challenges of modern vaccines Expert Review of Vaccines 2017 16(1): 55-63
[3164] Eddy S. Profile Hidden Markov Models Bioinformatics 1988 14:755-763
[3165] Garcon N. and Van Mechelen M. Recent clinical experience with vaccines using MPL- and QS-21-containing adjuvant systems Expert Review of Vaccines 2011 10:471-486
[3166] Han et al 2014 Characterization of the Structure and Immunostimulatory Activity of a Vaccine Adjuvant, De-O-Acylated Lipooligosaccharide PLoS ONE 9(1):e85838 (and associated correction Han et al 2014 PLoS ONE 9(4):94517)
[3167] Hauser M et al. MMseqs software suite for fast and deep clustering and searching of large protein sequence sets Bioinformatics 2016 32(9):1323-1330
[3168] Henikoff S. et al. Amino acid substitution matrices from protein blocks Proc Natl Acad Sci USA 1989 89:10915-10919
[3169] Hyslop N. St. G. and Morrow A. W. The Influence of Aluminium Hydroxide Content, Dose Volume and the Inclusion of Saponin on the Efficacy of Inactivated Foot-and-Mouth Disease Vaccines Research in Veterinary Science 1969 10:109-120
[3170] Ismaili J. et al. Monophosphoryl lipid A activates both human dendritic cells and T cells. Journal of Immunology 2002 168:926-932
[3171] Kensil C. R. et al. Separation and characterization of saponins with adjuvant activity from Quillaja saponaria Molina cortex Journal of Immunology 1991 146:431-437
[3172] Kensil C. R. et al. (1995) Structural and Immunological Characterization of the Vaccine Adjuvant QS-21. In: Powell M. F., Newman M. J. (eds) Vaccine Design. Pharmaceutical Biotechnology, vol 6. Springer, Boston, MA. https://doi.org/10.1007/978-1-4615-1823-5_22
[3173] Kensil C. R. and Kammer R. QS-21: a water-soluble triterpene glycoside adjuvant. Expert Opinion on Investigational Drugs 1998 7:1475-1482
[3174] Kite G. C. et al. Metabolomic analysis of saponins in crude extracts of Quillaja saponaria by liquid chromatography/mass spectrometry for product authentication Rapid Communications in Mass Spectrometry 2004 18: 2859-2870
[3175] Lambrecht B. N. et al. Mechanism of action of clinically approved adjuvants. Current Opinion in Immunology 2009 21:23-29

[3176] Lecas L. et al. Off-line two-dimensional liquid chromatography separation for the quality control of saponins samples from Quillaja saponaria Journal of Separation Science 2021 44:3070-3079
[3177] Li H. et al. Cutting edge: inflammasome activation by alum and alum's adjuvant effect are mediated by NLRP3 Journal of Immunology 2008 181:17-21
[3178] Livingston P. O. et al. Phase 1 trial of immunological adjuvant QS-21 with a GM2 ganglioside-keyhole limpet haemocyanin conjugate vaccine in patients with malignant melanoma Vaccine 1994 12:1275-1280
[3179] Ragupathi G. et al. Natural and synthetic saponin adjuvant QS-21 for vaccines against cancer Expert Review of Vaccines 2011 10:463-470
[3180] Reichert C. L. et al. Quillaja Saponin Characteristics and Functional Properties Annual Review of Food Science and Technology 2019 10:43-73
[3181] Martin M. et al. Role of innate immune factors in the adjuvant activity of monophosphoryl lipid A Infection and Immunity 2003 71:2498-2507
[3182] Marty-Roix R. et al. Identification of QS-21 as an Inflammasome-activating Molecular Component of Saponin Adjuvants Journal of Biological Chemistry 2016 291:1123-1136
[3183] Mata-Haro V. et al. The vaccine adjuvant monophosphoryl lipid A as a TRIF-biased agonist of TLR4 Science 2007 316:1628-1632
[3184] Needleman S. et al. A General Method Applicable to the Search for Similarities in the Amino Acid Sequences of Two Proteins Journal of Molecular Biology 1970 48:443-453
[3185] Newman M. J. et al. Saponin adjuvant induction of ovalbumin-specific CD8+ cytotoxic T lymphocyte responses Journal of Immunology 1992 148:2357-2362
[3186] Nyberg N. et al. Separation and structural analysis of some saponins from Quillaja saponaria Molina Carbohydrate Research 2000 323:87-97
[3187] Nyberg N. et al. Solid-Phase Extraction NMR Studies of Chromatographic Fractions of Saponins from Quillaja saponaria Anal. Chem. 2003 75 2:268-274
[3188] Pearson W. et al. Improved tools for biological sequence comparison Proc. Natl. Acad. Sci. USA 85:2444-2448
[3189] Schlotterbeck T. et al. The Use of Leaves from Young Trees of Quillaja saponaria (Molina) Plantations as a New Source of Saponins Economic Botany 2015 69(3):262-272
[3190] Soltysik S. et al. Structure/function studies of QS-21 adjuvant: assessment of triterpene aldehyde and glucuronic acid roles in adjuvant function Vaccine 1995 13:1403-1410
[3191] Smith T. et al. Comparison of biosequences Advances in Applied Mathematics 1981 2:482-489
[3192] Wallace F. et al. Analysis of an immunoadjuvant saponin fraction from Quillaja brasiliensis leaves by electrospray ionization ion trap multiple-stage mass spectrometry Phytochemistry Letters 2017 20:228-233
[3193] Wallace F. et al. Structural characterisation of new immunoadjuvant saponins from leaves and the first study of saponins from the bark of Quillaja brasiliensis by liquid chromatography electrospray ionisation ion trap mass spectrometry Phytochemical Analysis 2019 30:644-652
[3194] Yendo A. et al. (2017) Purification of an Immunoadjuvant Saponin Fraction from Quillaja brasiliensis Leaves by Reversed-Phase Silica Gel Chromatography In: Christopher B. Fox (ed.), Vaccine Adjuvants: Methods and Protocols, Methods in Molecular Biology, vol. 1494, Springer, New York DOI 10.1007/978-1-4939-6445-1_6.
[3195] Re-evaluation of Quillaia extract (E 999) as a food additive and safety of the proposed extension of use European Food Safety Authority Journal 2019 17(3):5622
[3196] Current Protocols in Molecular Biology, F. M. Ausubel, et al., eds., Current Protocols, a joint venture between Greene Publishing Associates, Inc. and John Wiley & Sons, Inc., (1995 Supplement).

1. A method for making a product saponin, said method comprising the step of enzymatically converting a starting saponin to the product saponin.

2-3. (canceled)

4. The method according to claim 1, wherein the starting saponin is a quillaic acid glycoside.

5-6. (canceled)

7. The method according to claim 1, wherein the starting saponin is a QS-18 family component.

8. The method according to claim 1, wherein the starting saponin is a desglucosyl-QS-17 family component.

9. The method according to claim 1, wherein the starting saponin is a QS-17 family component.

10. The method according to claim 1, wherein the starting saponin is a desarabinofuranosyl-QS-18 family component.

11. The method according to claim 1, wherein the starting saponin is an acetylated desglucosyl-QS-17 family component.

12-17. (canceled)

18. The method according to claim 1, wherein a single starting saponin is converted to a single product saponin.

19. The method according to claim 1, wherein a plurality of starting saponins is converted to a plurality of product saponins.

20. The method according to claim 1, wherein the starting saponin is obtained by extraction from plant material.

21. (canceled)

22. The method according to claim 1, wherein the enzymatic conversion involves the removal of a beta-glucose residue by a glucosidase.

23. The method according to claim 22, wherein the glucosidase comprises an amino acid sequence according to SEQ ID No. 262, 208, 63, 229, 250, 5, 101, 207, 169, 247, 302, 324, 319, 9, 240, 325, 338, 850, 879, 868, 826, 804, 888, 881, 891, 816, 827, 857, 853, 842, 814, 886, 885, 838, 829, 808, 828, 870, 873, 844, 882, 874, 825, 824, 823, 810, 894, 849, 803, 890, 841, 832, 830, 845, 871, 837, 883 or 809 or functional variants thereof.

24. The method according to claim 1, wherein the step of enzymatic conversion involves the removal of an alpha-rhamnose residue by a rhamnosidase.

25. The method according to claim 24, wherein the rhamnosidase comprises an amino acid sequence according to SEQ ID No. 992, 1003, 1052, 1073, 1017, 1055, 1075, 1001, 1007, 1061, 1079, 1027, 1039, 1041, 989, 1053, 1018, 1066, 1082, 1076, 993, 1077, 1046, 1015, 1063, 1054, 1074, 1067 or 1033, or functional variants thereof.

26. (canceled)

27. A saponin prepared by the method of claim 1.

28. (canceled)

29. An adjuvant composition comprising the saponin according to claim 27.

30. An immunogenic composition comprising the saponin according to claim 27, and an antigen or a polynucleotide encoding an antigen.

31. (canceled)

32. An engineered glucosidase polypeptide comprising an amino acid sequence that is at least 80% identical to the amino acid sequence of SEQ ID No. 262, or a functional fragment thereof, wherein the engineered glucosidase polypeptide includes at least one residue substitution from:
F44Y;
V60L;
G117A;
F170N;
V263G or V263L;
N351H or N351Q;
A355H, A355I, A355L, A355M, A355R, A355T or A355W;
A356P;
R357A, R357C, R357K, R357M or R357Q;
G362C;
T365A, T365N or T365S;
L367C;
V394R;
V395Y;
Q396E, Q396G, Q396N, Q396P, Q396R, Q396S or Q396Y;
F430W;
R435F;
V438T;
V440F;
F442M or F442Q;
G444T;
A473F or A473R;
L474C, L474I or L474V;
I475F;
L492C, L492G, L492H, L492I, L492N, L492Q, L492V, L492W or L492Y;
Q493F or Q493H;
P494H or P494I;
S495I, S495K or S495Q;
G496P or G496W;
D498A, D498E, D498F, D498I, D498K, D498L, D498N, D498P, D498R, D498S, D498T or D498V;
A502R;
M504G or M504R;
L507A or L507R;
T508M;
L529M;
F535P;
A536D or A536E;
A537R;
F541A, F541I, F541L, F541M or F541V;
L542I;
Q543G or Q543L;
E547L; and
Y585W.

33. (canceled)

34. An engineered rhamnosidase polypeptide comprising an amino acid sequence that is at least 80% identical to the amino acid sequence of SEQ ID No. 1017, or a functional fragment thereof, wherein the engineered rhamnosidase polypeptide includes at least one residue substitution from:
(i) A56C
(ii) A143P
(iii) Q181H, Q181R or Q181S
(iv) L214M
(v) G215S
(vi) F216M
(vii) G218D or G218N
(viii) K219G
(ix) A23 8M
(x) T252Y
(xi) T311W
(xii) V326C
(xiii) G357C
(xiv) S369C, S369I, S369K or S369M
(xv) I487M, I487Q or I487V
(xvi) K492N
(xvii) V499T
(xviii) G508S
(xix) R543C
(xx) L557Y
(xxi) G634A
(xxii) S635N
(xxiii) A690C and
(xxiv) Q921H.

35. (canceled)

36. A polynucleotide comprising a sequence encoding an engineered glucosidase polypeptide according to claim 32.

37. A polynucleotide comprising a sequence encoding an engineered rhamnosidase polypeptide according to claim 34.

The application's sequence listing, which the Patent Office published only in electronic form, follows.

SEQUENCE LISTING (1198 sequences)

SEQ ID NO: 1 - protein, 800 aa, Cyberlindnera fabianii
MTLVEKVNLTMGVGSGMGVCAGWTGSVPRLNITPKCLQDAPLGVRSADLVSVFPCGLATASTFNKQLFYDKHVAIGSEFKGKGIDVALGPVYGPMGVKAQGGRGWEGHGPDPYLEGIAAALGTVGLQSQGVVSCAKHLVGNEQEHYRFATDFEKRTMDYSHNVTESISVNIDDRSLHEIYLWPFAEAVKAGVTSVMCSYNRVNQSHACQNSYLLNYLLKDELGFQGFVVSDWNAVYSGVDSAIAGLDLDMPGEDNYFGSNLTMAALNGSLPIDRLDDMVTRFLAGLIYAGVHNPDGPNFHAGTFETYGQEFFGAKAGPVIELNQHVDVRSDFSRFVSLKTATEGIVLLKNENNTLPLSKEKYNRIALLGRAASDDEQGTYCHRFGCGTGAMGTGYGSGAGQFSYFVTPKDGIGARLTKEKISWEYVPDNWNQASAMTSAGYSDAAIIVGTSASGEETFSLLGNYGDPNNLTLWHNAEELIKNVTTVNNNTILVLTAGMQIDLEPFIDNENVTAVIYSSYLGEDFGTALAAVLFGDVNPSGRLPFTIAKDTSHYIPVVKNVTIDEPQDNLYEAGIYVDYRYYDKHDLDVRYEFGYGLSYSNFTLSDLSLSVVEEFSETIEDDVDDYLPVFEYDDTDLSAEEARVPSGFTKIKGWVYPYISSNATVKRGNYTYPPGYFTEQLSKPVSKAGGAPGGNPHLWDVGYVINVKTTNEGPYDGAFVPQLYVSFPDDDEFDTPPVQLRGFDKVDLQVGRSAWSTFEVTRKDLSVWDTTTQEWRVLRGEYKFYVGSSSRKLDLVETVTI

SEQ ID NO: 2 - protein, 716 aa, Flavobacterium gilvum
MKKSTLFILFLLGINNFYGQNRSDKEALQIANDLLSKMTLSEKVLLIHGDHIYSSPGLERLGIPRFYPSDGPCSIRPELTDKGEYLHAGDTIDCATAFPTLSALSATWNPQLANQFGDAISSELRARGKDMYLGPGVNIMRTPICGRNFEYMGEDPFLTSSMAVPLVKGVQKNNVSACIKHFALNNQELERFSVNVVASERALHEIYFPAFEAAVKKGGTLGLMGAYNKINGDWCCESDFLLNKTLKQDWGYKGVVISDWGAVHSLIKAVQAGCDYESGNSSHYGHIEKAINEGKLSVSDVDEKTRRLLWVFAKIRMVGPGSEQREKGKLRTESHKMVARKIAEESIVLLKNDEQILPLDKNKISKLLIVGKIANARLTIDVNTKGPCDLLTGGGSGEAKPLYEITPLEGIKRYLSTSANVEYIESANYSDASFIQKVKTADVVIAFTGNTHAEEQEGQDRKDITLPEGQDEMVKAVLAIQPKAVIINQSGAPVAMPWSNQAKAIVQNWFNGQENGNALARVIFGDVNPSGKLSSTFPKQLSDVACHSLDAYKAVSENYKEDILVGYRWYDKQNIDPLFAFGHGLSYAKFQYGKIKITQLKKGNTIKVIIPVKNISNRAGAEVVQLYIHENTPSVLRPNQELKGFQKVQIAANETKEVVLYLTAKDFSYWSETAHDWKYDFGNYEIKVGSSSRDIRVNKKIVLEKDFAIKLPTSGL

SEQ ID NO: 3 - protein, 792 aa, Algibacter lectus
MFMKQNQNIIKSICLILVFFNLSVIQSQENKPFLTEELSIKVDALMATMSMDEKLAQITGTRLRDIMVDGKVSIEKCREHIPHGIGHFCQFSSGLTLEPEQLRDLVREVQHYLMTETNTKIPAIFHEEAITGFATQGATTFPQQIGVGCSWNPEIVKNNANSTAQSMRAAGATFALSPMLDLSRTAHWNRLEESYGEDAYLTSRMGVAFIKGLQGNDLKTGVAATAKHFAGYGTANDNAKELYEEYLMPHEAAFKVAGAKSVMPSYGKYKALAVSANPTMLDQMLRKEIGFDGLVVSDYGAVNLIYKGHKQAKNSAMAGAMAINAGVDIELSSPIAFPLLPDAIKDGLVTEETINKAVKRSLVMKAKLGLLDKNLKIGKDGPLDFDPPSNRELAYKTASQSIVLLKNNGVLPLNSDIKKIALVGPNASTYHCLLGDYTYQSMISFWHSTDFDPTNPKLITLLQGLENKLGENVEINVERGCDWSAPLESKIDTSGLGDDRLSKLKMLTVKGLPQPDLQKAIKISEESDVIIAAVGENLYLCGEGRERKGIRLPGEQEAFVEKLIATGKPVILVLFGGRQQLVSKFEDKCAAIVQAWFPGEEGGNAIADILVGNVNPSAKLCVTYPKTESRAEINYKNGYGNGDLVQYPFGFGLSYTDYQYSNLKIKSKIDINDERFSVSLKVKNIGDMDGTEIVQLYMSSIDKASTQKPIQLKGFERVKLKAGEEKTLTFNVSPEQFVQYKNNKWIVESGKYQLKVGASSTDIRLEGVIELKGKDVILENGRDVFFTMNKTK

SEQ ID NO: 4 - protein, 787 aa, Microbacterium azadirachtae
MTLPPFDVDTVLAALTLEEKASLLSGLDDWYTQPLDRPGLPQRVPSIEVGDGPHGLRKETGVDMVWVPATGFPTASAMGASWDRQLMRRVAAAIGEEARAEGVQVVLGPGVNMKRSPLCGRNFEYFSEDPVHSGELGAAYVDGVQAVGVGTSLKHFAANNQEIERTRISVVADERTLRETYLSAFERVVTKADPWTVMCSYNRLLGVHASQNHWLLTEVLRDEWGYRGAVVSDWNAVHDRVAALRAGLDLEMPGTQGATDAEIVAAVQDGQLDIGVVDAAARRVLELVARAYPGADRVNGAVMDLGHAAGDRLTAEQLRLLRAAEHHELAREAAIGSMTLLRNETIPGGGGPALPLEEHSEGAVAVVGAFAEHARVQGGGSSGVDPTRIDAPLAAIRAIANGRVHYAPGYIYEVKNAYQDDNLAILAAHGVVTEEEKPRVARRSATLAKELQLAEAVQHLGKRPLSAAAERLIDEAAVIAGQAETIVVFAGLPLSYEQEANDRDTLALPADQVALILRMADVREKTGARLVVVLSNGSPVTMDPWHDRVDAIVEAWLGGQAVGSAVAEVLFGRSNPSGKLAETFPLALEDTPGFPNWLGERGTVLYGEGVFIGYRWYDALRREVRYPFGHGLSYTTFSYSDLRVDLVDAEVGRVTVTCTVTNTGDVAGQEVVQLYVGDPDAEVQRPLRELRGFEKVKIEAGESTRVRFELLNRDFAYWDSAAVRPDGKTGLWRREGGEFRIEVGASSRDIRLSESIVLSDDPSIPPLVPDAELLDIAASRFVQGHAG

SEQ ID NO: 5 - protein, 834 aa, Unknown
  Actinobacteria bacterium
MSELVENLILRLTLEEKATLTSGTDMWNAHGIDRLGIPGLKVSDGPVGVRGERWVGTTSACTPCGTALGATWNMELIEQVGVVLGEEAKSKSVDIVLAPTVNLHRNPLAGRNFECFSEDPFLTGLAATAIINGIQSAGVGACVKHFVANDSEYQRHTISSQVSERVLRELYLLPFEMVIRDTDVVAVMSGYNRLNGTYCAEHDWLLNQILKQEWGFDGLVMSDWWGTMSSASAAGGLDLEMPGPAKYLGPQLAQMVADGTLDATALDEMARRILHVSERLGLLAHSSPATPSRAAERSEDLPTHQAILRSAAEQAVVLLTNRLIEGQTVLPLDVSSLRHVAVIGPSADTAAVLGGGSAAVNPHYAVSILQGLQEALPSHVKVTHEIGVHASHSAPPIDSRCLRSAVQPDKPGLDVEYFANREFAGTPACVEHAAQPRLVWMGSEAASGVATNNLSVRVSGTFIARSTGTHTFALVTGGTGGRVLLDGESILDNYTGQESGTAFFGLGSSEILAEVYLEQGEERGIIGEFTGYEGMDVAAFLIGHREPLAADGIERAAKAAAEAEVAIVVVGLDQDSETEGEDRKTISLPGEQDALLRAVIAANPRTVVLVNAGSVVDLAATEGAAAIAQTWYLGQETGNAVAAVLTGSVDPSGRLPTTFGKKVQDWSSHLNYPGEFGEVLYGEELFMGYRGFDQQQIEPAFCFGHGLSYTSFDWSGATLSTSSLSQTELLDGAQFSLSAEVTNTGDTSGYEVLQCYVQRDQSQSGRPEQELCGFVKVHLSPGQTATVNIPLNFRSCAVWDQPSRSWLVHPGEIKFRLSSSSRDTRSTAAFQVTT

SEQ ID NO: 6 - protein, 803 aa, Unknown
  Chloroflexi bacterium
MNPFRKKAQEIVAQLSLEEKANLCTGGDFWHTRGIEQFGLAPANLTDGPHGLRKQNDDEQSPDKGKMVPAVCFPAACSTASSFDVSLLEKMGQAIGEEAKAEGIAVLLGPGINIKRTPLGGRNFEYFSEDPFLTGQVAAGFVRGVESCNVGTSVKHFAANNQESWRMVGDSIVDERALREIYLSAFETVVKESNPTTLMCSYNQINGTYASDNGWLISDILRKEWGFEGTVITDWGATNQRIEAILAGLDLSMPGPVPAYTQELIEAVNAGKAPLETLNESATRIVEILIRNAQNKRSTFDKEKQHNLAGEIASECAVLLENDGVLPLQAGKKLAVLGGFAENPRFQGGGSSHIPTTKVTSVINALDEAGISYTYSEGYSSNEIIPDKKKIEQAVQTASQADVVIICAGLPNKFESESYDRKHLNLPDSHLYLIDEVIKLKKPTVVVLMQGSPTLLPFRKKVNSILLAGLTGQNGGAAIVNLLTGKANPSGRLAETYPLSLESVVAIDNFGERAVQYRESIFIGYRWFDTANIEVQYPFGYGLSYTTFSYKNLRVSKPILDHADTISVYVDVTNTGKYAGKEVVQVYIEPPKSETYRATHELKGFEKVFLNPGETKNVCINLPLRAFQFFNNATQSWYAEPGKYTIHISRTSRDPILSASVEIKGERQVVSDFRQKAPEYFTPHLGTKFSEKSFKEIYGKPLPIEMPIRPFHRNSPIADTRQTILGKLALKLAVSKLRNSFSEIGSSDADADEIQMLLDSTIFGLPFRSLVILAGGKLTFTQLDGIIDIFNGHLLKGLKKLKK

SEQ ID NO: 7 - protein, 803 aa, Komagataeibacter rhaeticus; identical to SEQ ID NO: 6

SEQ ID NO: 8 - protein, 820 aa, Unknown
  Bacteroides sp.
MNIRRCFIIGILLCGIGILNAQVVITSEAEQRAKEIVAKMTLKEKLRYISGYTGGFSICPVPRLGLPEVFMADGPQGIRNNTKSTMYPSGILSAATWNRDLNYRLGRGLGQDAKARGVGILLGPGVNIYRSPLCGRNFEYFGEDPYLSGEVAKQYILGVQSEGVIATIKHFAANNQEWDRHHVSSEVDERTLQEVYFAPFRKAVKEAHVGAVMNSYNLLNGVHASENRWLNIDILRDTWGFKGILMSDWVSVYSTVGAANHGLDLEMPTGEYLNEELLMPAIEQGLITEATIDLKVQHILQTLIAFGFLDKEPKDTSIALDNPHSRQTALDIAREGIVLLKNEGNMLPLKGRTVVMGSNAEVLVTGGGSGFVSPFSTVSIAEGLEQLQKRNTIRLKDDLLFDDLKDAIYADEGKRQKGFKAEYFKNVELKGTPDATCMENQIAHDWGTGVPLEGFPADGFSVRWTATYVPVTNGLVRMTMCGRGGYRAYINDQLICTDHLPEREQVIEVEAGKKYRLRVEYHNYGGDARIGLKAGILNESLLKQTLAKAKNVVLCVGFNNGDEDGGIEGEGADRSFALPKPRLELIRKVTSLHDNVVVVVNAGGGIDFSDWGDKVKAIVMAWYSGQEGGRAVAEILTGVISPSGKLPISIEHRWEDNPVSKSYYENMKFAEYKRTQYSEGIFMGYRGYDKSGIKPLYPFGYGLSYTTFAYGNLMVEKNGVNRVKVTFDISNTGKMDAAEVAQVYVHDVKSSVPRPYKELKGYEKVFLKKGETKRVTIELEDDAFSYYDMDKQRFVVEKGDFEILVGTSSECLPLKGSITL

SEQ ID NO: 9 - protein, 811 aa, Streptomyces rubrolavendulae
MTADEAVEAALGALDLDTKARLLAGQDMWTLPAVPAVGLASLVMSDGPVGVRGVRWTADDPSVTLPSPTALAACWDPELARRAGRLLAQEARRKGVHVVLAPTVNLHRSPLGGRHFEAYSEDPYLTAETGAACVRGIQDGGVAATVKHFVANDAETDRFTVDNTVPPRALRELYLAPFEAIVRCARPWALMAAYNQVNGVTMTENRHLQTEVLRDAWGFDGVVVSDWFAARSTTGALVGGLDVAMPGPHTVYGDALAAAVRAGDVDEALVDRSVRRVLRLAARVGALEGAEPAVPSPPAHVDGEALAREIAHRSFVLVRNECGALPLDPARSRRVALVGAAARDARVLGGGSAHVFPARTVSPLDGLAAALPEGTELVHARGADLSGEPAPAGPGFALRAVCRDAEGTVLADVPLPSGQIQWIGADLPGGVTHEALHTVEVTGTYTPREGGAHGFGTRGVGAFTLTVGGRVLYDGTREAEPAGDPFEAFAGTPAEHGAADLAEGVPVEVSLRHTVDRDRPAPLPAVVFSLLHRPPRRDPDELIAEAVEAARGADAAVVVVATTERVESEGFDRADLRLPGRQDDLVRAVAAANPRTVVVVNAGAPVEMPWRDDVAAVLLTWFPGQEGGAALADVLLGAEEPGGRLPTTWPAALADAPVTAVTPVDGELRYEEGPFIGYRAWDRAPGGPAPAYPFGHGLGYTTWEYESLVVTPATARVRVRNTGTRPGREVIQLYVAPRADLAERPARWLVGFASVTAGPGARAEAEIRFAPRPFDVWDEEAGAWTAVPGQYEIRAGRSLTDTRLTVTLELD

SEQ ID NO: 10 - protein, 756 aa, Clostridium roseum
MEYSKKHVRKGDTMRKRAYKILGLITIMSLVLPVKFSYAKMKASNVVTLTDEASIPTVISEMTLDEKCQMVCGIGLMTPYGGAGSTFGIDRLGIPAVELTDGPQGIRMGGLTITPNYAPKKYATCFPNPLLNGSTWSTELMRQIGDVMAKEGRDYGADVILSPAMNIVRDPLGGRTFEYYSEDPYLIGKLSTEEVKGIQGEGVGACIKHFAGNNQENNRIDGDEIISERALREIYLPQYETTVKNATPWTAMAAYNKVNGTRMTENSYLLNNVLRDQFGFNGMVMSDWGAYNRAEAFKNGLDLNEPGGFYNMAGIIMPAWLLQIKPAVTSWGAIKESDLDRAIKNILKLVIKTPTFKGEYGDKKQFLKKTKLTQNLQVEGDVVSRNLAEEGIVLLKNDNNTLPLKSGNKVLVAGKNAFSGSGIIYEGNGSATVNADSNDVTSLVDGIKNAGFNVTTKVNGNNIEEGVSNEVAIASATNLDAVIISIGLPGHEGSDYSSMNLSDEQENLIKTLGQAYHAVNKKVIVLLNTGAPVETASWSQYADSILWVGLPGNKGAEAIGNIINGSVNPSGKLTVTWPVKYSDVPDSSYFPKDTKTPVNYKEGIYVGYRYYDSKNVIPQYRFGYGLSYTNFKYSNIKLSSDKFDLKDDNSVINVTADITNTGSVKGKEVAQLYLKASSNVVDRPDKELKGFAKTKLLNPGETETVQFSIDKRSLSYFNETTSSWTAEPGQFTAIVGGTSDDNILQTSGLQDTFNAN

SEQ ID NO: 11 - protein, 461 aa, Unknown
  uncultured bacterium
MNSDKNDKILKFPEGFLWGAATSHFQVEGHPKEIGGSLSDWSQWTKVEGKIFDKSHADDACQFYHRFEEDLSLIKDLNLSAFRISLNWPALVKEDGSLDEGEVDYYKRVLTGLKENGIKTFVTLFHFCLPEKLSMSGGWQNEETAVSFGKFSGIVAKRLEGLVDYWLTINEPLAYVYQGFISGHWPPGGNRDYVAAFTALRNFLVGHSLSYDAIKEHSNKPVSYTLHWRPFYPKNRFSPLDHMVRYYRDQIFNHLFPRSVESGILKFPWPVSSGVIKSIEGEIKGLKGKCDYLAINYYTRELSRFKPAWPLDLFGESSPENELAVSDMGWEIYPEGLYDLLVRQTLPYQTTPSGAKRPVVITENGFANMYPPELSEGDWSLKDEQRVNYLIRHLEQLYRAIRGGVDVRGYLYWSLLDNFEWAEGLSARFGLVRVSYPTQERLLRASARVYQEIARNNAIQL

SEQ ID NO: 12 - protein, 718 aa, Unknown
  Firmicutes bacterium
MDRYNLERRIRAEKWAEGKLAQMNLDEKLHQLAASFPNGNERLSIPHMQQGECLHGAVTPYATSFPQALALGSTWDTLLIEQVATVIAKECRACGIHHCYGPMVAVVRDPRWGRIQEAYGEDPYHVSRIGLAFSLGLQGTGDKYLDKDHIVATAKHFVADGEPLGGLNGAAMEISERSLREVHLLPFETLVKEGHVCSVMPAHHSLNGVPCHASRYLLQNILREEYGFDGIVVSDNGDIRKLHTALFVSDSPETSAVMAMNAGVDTELAWMIPWNENRLYGPVLKSAVEKGRISEEIVNKSVMRVLIKKYELGLIDDPTADPKQESLEKCYMGTSGTDHVSMAGKTLYFGKSRPDRKQVCYNKDHDLLALKAAFKSIILLENKNNLLPLNKNSINRMAVIGPNANRLLLGNYSTDKPKYFVSVLDGIKNYAEGNFEITYSQALDQDDYGKINIAHAVKKAKEADITLLVLGGNEITCMENEDTDDLSLKGDQQLLFERVRKVAKKLILLIIDGRPSSVIWAKEESDAFLLAFYLGQECGNAVAMTIFGQNNPSAKLPVTIPRNVGQIQCHYNRFYPGRAPSYYKSSVEPLYPFGYGLSYTDFDISAPIIETQENQKYTVNDEIPVLVTVKNTGYVKGEETVQLYIKDCIASLVRPVLELKRFRKVELEPGEEKTIRFNLKPRDFAFWKDKKWITEPGKFIIMAGNSSIKYKETELYLE

SEQ ID NO: 13 - protein, 892 aa, Anthracocystis flocculosa
MSPGIDFDRPHDDDLDARIEAQLSQLSTTEKIQLTSGDDFWRTHAVPSRGIPCLKLSDGPSGARGGGSFSDPTPAALFPSSSCLGATFDRSLAYRMGNAIACDSKSKQVHLLLGPTINMVRDPRNGRSFETYSEDPLLCGALGGEYVLGVQDTGVGACLKHFVANEAEHRRRVNSSNVDETTLRTVYLRPFQIALARIREAHRKGEDGAQARPFRGSVASIMTAYNRLNRVSCSENDWLYNRILRDEWRFGGLVVSDWLALHNHGLKVTDLEMPGPSIHRKVDRVLQLIKDGVVTEVDIDRRAAAVLRLIQQVAPLGFRTLAEESETSPEIQETADVIRQIAAEGAVLLRNSAGLLPLDPMTPPRRIALIGRAVTQPIQSGGGSANLKPQHVSSLHSAVTALLGDRSEVAVAQGCETWSFAPPLPTDLVSGIEFEWYSRDSESGKRELRGRTQPDSLRWDASLNGLPPLAREGKLDAKTWSITASFDLQSDRDMDYVLQYHAFGRLTIATGKAPLVFEGEKDPFEYLLHPHHYRIERRLHLEAGRRQRITFDYEPVRGLGAWEKRFFSSFGVGGYEVRDPKLDIQEAASVAASSDLAVVLVSTGPEWESEGFDRETLCLPRGQNEMVRAVLEAQPNTVVVTVSGAAIELPFLDHSTVVHGWFGGQESGSALCDVLFGQGFAPASGRMPHTWAKSLEDIPAASLGPRGFPGIMEDDDDVGPNTYYDEALSMGYRHFETRSVRPTVWFGGGLAGYTRFTSSMRVRGGVSRSSNAVAEVTVRNVGQRSGKEVVQIYLADAFGAGTGRSLVAFDAVRLAAGKEARVELPIRAEMLSRWCQDAGRWKVRKGWYDLVLAKSADPADEVQRAQVEVQEDWDWRGLEASEEIDDLPAPKI

SEQ ID NO: 14 - protein, 403 aa, Bifidobacterium boum
MMRFPHGGGSSGTAQAGGLNAPEPIRGVNLGNWLVLEKWMEPSLFEGYRAEDEDTLATVAPKDQLAQRIRHHRDTYITERDFREIAACGMNLVRLPVPYTVFESEPPLGGAWRYVDKAMAWARTYHLRVLLDLHTAPGGQNGFDSSGLIGAVTWHKKPQNVEKAITVLEGLAHRYGHDPALFGIEVINEPVSWPVFFSNRKKLVARNPKDKRYSSYVPMSFLRQYYRATYKRLRRYLPDDKAIVFHDGFRFGLWRDFFKRNQMTNVYVDAHVYLSAAERIVQVHSPWAYRLFLRWQRRRIRSMQRVVPVLVGEWCVENEWAKNLDPGEMDLDQFDDAQRRRFAHVTRMQLDCFGQAAGWMYWSWKLEPSSHTAPDALWKECWDFRRCLMHGWLPDIAAQDDGR

SEQ ID NO: 15 - protein, 754 aa, Jejuia pallidilutea
MRKLFLLCLLISIAITSCNEEVSKDYKDASLSIDERVEALLPKLSLEEKVAQMRIFHANIGVKHDENGKLKLSDKVVEKLKLGIAGIKNPGEHIDAVAAAKLNNELQKYIIENNRWGIPALFVTESYNGVDAEGCTKFGRPMTSAASFNPELVKRQWDVVGREARLRGMHMCHSPEADIVRDPRFGRMSEAFGEDTYLTTQMVKNAIIGVQGNYEGLGNGTHIGAVAKHFAGYGQVLGGSNFAAIEISPRTLIDEIYPPFEAAVKEAKTLGIMASHGDLNGVASHGNPELLTGVLRDQWGFEGYVVSDSNDIARLFYFMNVAESPEAAAQMGLEAGIDIDLYAEDSYAYLPEMVKKNPELEKLIDRSVRRVLRTKFILGLFDNPYINIEDVEKGNRAASSLELAKESDLESIILLKNEDKALPLSKEKSLKVALLGPLLKDNTQEMFESVAGSNVKFISEKGFQLTNQKGGAPKLLDRDPKAIASLVNKARSADVSILFLGGDEYTSKEAYFSNSTLGDRATIDPVGPQDELVEKIKALGKPVIVVLKHRRTLSINVIAEQADAILDVWDLSEFGDESTAKIIFGEVSPSGKSPVTIPRSIGQIPFHYSMKEINYKKEYLFLEQGPLYPFGHGLSYGDFEYSDISISNAEITPETDLEVSVKVTNNGNVKAKEVVQMYIKDEIGSVTRPDKELKGFEKIELDAGESKTVSFKITPKMLEFTGINMEKVLEAGDYTVMVGTSSNKYLETTFKLQK

SEQ ID NO: 16 - protein, 600 aa, Ceratocystis fimbriata
MLGVPPKQPALDSQVDILLTKQEATPAVVSTEISAVQKRRRISLIVIGTIFGVLASQNIIGGSKNSNKSAELAENADARATGTSSQVTATSGQSSASATSTASDEDEEDDSNNSEGNSTSCSRIRNIPKDVVGTYLDMTKWMDTTDFNCTWTDATVGNLSLAGLNSTWSDNTRANDRVPPLNTSWGSYMDRPIRGVNVGGWLNLEPFMTPSLFDYSTDLGINDEYTLLKHLGPEKGREVLEQHYSTFITEDDFAAIAAAGLDHVRIPFSYWAVATYEGDPYIKGVSWRYLLRGIEWARKHGLRVKLDLHGLPGSQNGWNHSGRAGNITWLLNGTESAMLNRKRSLDIHKQLSAFFAQERYRNVVAFYGLVNEPGASIPTDDLVSWTKEAYNIVSGAGYTGTQVYSDGIRDVNSWSGLFEGYGDSLSIDTHIYIIFTQPLLNKTRAEKVDFACTKWTEDRDENIAKVGPTMVGEWSVADNDCTKYLNGANAGARWDGSFETNNGMSWCPTQDDRCTCEHSLGSPKDYSDSYKSFLYTFATAQMEAYEHSWGWFYWSWKTENAPLFSYQAGIEYGFLPKLAYERIWDCTKPVPDFGEWPEYQ

SEQ ID NO: 17 - protein, 825 aa, Unknown
  Actinobacteria bacterium
MSADNDEDRTTQVVPSSAAYRDASLAIETRVDDLITWMTLSEKLAQLGGVWSTELLGTDGFSDENAARLMPDGTGQITRIAASTGLRPEGIAALHNRIQEWLTSQTRLGIPAVVHEEAVAGFCARDAVQFPQAIGLGATWDPELVGQIATHIRGEMLAVGARQALAPVLDIARDPRWGRVEETYGEDPILTAALGVAYVRGLQADADDAVGGTTRTHLHQGVIATAKHFLGYGLSDGGLNHGPVQLGERELREVFAEPFAAVIREAHIASIMNSYASVDGLAPAGSRALLTELLRDQLAFSGSVVADYFSVDMLVTHHKVAPTKGVAAAKALLAGLDQELPTLDCYAQLPSLIRAGIVPEAVLDLSLRRVLRQKFALGLFEQPLVDESTAAAAFGTAVGRSLARTAAQKSLVLLTNDGIIPLNPAILSSIAVIGPAADNPRLLEGDYHYPAHLELLFDSAENATDSTAEKTAENTAGSELAPHAAVSATGDFAPGPYLPEITTPLRGLQNALSAIDVQVQFASGCDITGEDRSGFDAAVALAASSDVAIVYVGGRSGLTLDATVGEARDATDLGLTGMQLQLLEAVHATGTPTIAVVISGRVHTLAAVESASSATLLAWLPGCEGGSAIADVLLGTVAPSGRLPVSLPRSVGQVPVHYNHRSGGGKSNFWGEYTDSPTTALHPFGFGLSTSSFSYSDPVFSEGSTTESTVVQVTVTNTGRLDAEEVVQCYVHDEVASVARPVRQLVGFARLTIAAGQARSLRFVIHPSRLAFYDEQMDFVCEPGAFRIELGGCAGHPELVTTCDLSGDVVRYKQSQVIATVVELI

SEQ ID NO: 18 - protein, 710 aa, Unknown
  Rhodococcus sp.
MGRHGHSRERAVELASQLELREKVGLVSVAMTIGDDAPRDALGSAAYCPGVPRLGIPAWDESDASLGVTNPNQVRGEEPATAFPSLSALGATFDRDLAEEMGRALGEESRQKGFSVQLAGGVNLVREPRGGRIFEYIGEDPLLSGVLAGAQTAGIQAEGVVSTLKHFALNPQETGRVMVSSTITEQALRESDLLAFEIALEIGGAMAVMPGYNMVNGKYASENHFLLTEVLKGDWRFPGFVMSDWGATHSTVHAAMAGLDRQSGRDLDTEHFFGDALMQSVQRGDVPVSRLDDMVLRILTALDSVGALSERRRPGPVSFANHATVSRRVAEASIVLLANDSCALPLDPLGGRIAIVGHSAHIGVLAGGGSTTVTPPGSDLAQGLSIPQMDLPRVHHAPAPLTTITAAFPDREVVHVSPEELHLLGDDDVAVVIVEKWSSEGADWPDLSLGDGQDDVITTTAAHAGTTVVVLETAGPVLMPWIDSVDAVLAAWYGGDHGADAMARVLSGDVCPGGRVTVTWPHAECDLPRPRMTDPSTTTSFPGAPRKGGYFGVDYDIEGADVGYRWYERERLSPQFWFGHGLSYTTFDYRDISVEIGAGGLPVVSLTIENTGDRAGVETPQVYIAPPAGQGQDTFRLAAFHRVRLHAGEASAVQLVLTEERVYSSYDPDGSRWTRAAGDYLVRIGRRAGHTEFEACLRLTSRTWGYADAN

SEQ ID NO: 19 - protein, 653 aa, Valsa mali
MSQEDRIEALLRALTLEEKCFLVAGKNMWETCDVDRLGIRSLKTTDGPAGVRGATWIDGTHTTFIPCGISLAATFDPALIERVGDILGAETRSKNSNVLLAPTMNISRSPLGGRNFENFGEDPYLSGIMATSYIKGVQKHGVGACMKHYVANDMETRRFNMNQQIDERTLREIYLKPFQMTLAAQPWTAMAAYPKINGHHADCSTFLLQDILKKEWGFDGLVMSDWGGTNDTVESILAGTDLEMPGPPIRYGKALVEAVKAGKVSEKDHLNASVMRLLRLLERAGLLDPERKQADQELDSDLPEFRQTAREAASGGIVLLKNSGILPLMPQKIKKLAIIGPNAKTPTTGGTGSAALRIDEQALFDEAVAVATEAEIVVLVVGHNNDTEKEGIDRTSLSLPRRTNELVEAICRANANTVVVTQSASAIAMPWAGAPPAIVHAWYQGQENGNALADVLLGHVSPSGKLPVTFPSRLEDHGSHSWFPGDAERDYAEYGEGVLVGYRWFDAKNIQPLWTFGFGLSYTAFRVTDAKVSGTINLDGSAKAIISATVTNTGAHDGAEVVQVYVAPSPVIAQKGRDAPPRSLVGFYKVFVRKGKSELVRISLDVSAVSWFDVEAKGGPSSSGRWRADDGKYKCFLGTSSRDIVAEVEVVVE

SEQ ID NO: 20 - protein, 841 aa, Unknown
  uncultured Bacteroides sp.
MNIKKLLIISISAISINTYAQSSIEEKVATLEKQLTTKEKIDLLCAKAPKIAHANITRYDWWSECLHGVARAGKATVFPKPIGLGSTWDVDLIKRISTAISDEARAKYHKALRNKGYSDRHEGLTFFSPTLNIARDPRWGRTSECFSEDPYLTSQLGVAFIQGLQGEDPTYLKTVATAKHFVANNEENRRLGGSATVDDMSLREYYFPAFQAAITTAKAASVMGAYNALNGIPCCANSYLLTDILRKEWGFKGVVISDGSAIDKLYTHHKYAKTLEEAAALALKAGCDMSLRDEYREGLRKAYEKRLINTGDIDKALKRVLTLRFRLGMNDPSGKNPYTHIPDSVVECSQHRQLALEASQKSIILLKNDKILPLKLNNQKIKKIGLIGEAFTSVYYGDYSGTPEHNTTLLECITAEVGQKAEVTWINEQVNDEIIPSNYLTRSEKEAYDGILGFTGEYFNNSKLTGEPDLRRQDLSLSFIPSKDKQLKDYQQLSARWQSTLTPPNSGNYTLTFSGSGNIKLFINDSIVINKTSNKKIKESFNLLLNKDKKYNIKIECKEINVQSLVELSWRPPFSTQKETPETIAENSDLVILFLRDDNSSEGRDRKNLHLNNSQEELINKVTKANPNTILLIGSGTAISLKNIVQKPKALLNIWISGQGEAQAISDILFGKVNPSGKTPVTFFADEKQLPPMDDYNVKNGRSYQYFKGEVLFPFGYGLSYTSYKYSSPKVNKTHFTGNDSICVTTQISNNGQYDGEEVVQCYVSSPEWEKEGLKEKLVDFKRIFIKKGETQSINFNISKDDLLRWNSNYKEWGITANKYEVSVVAHSAMDNSSTFSYSEN

SEQ ID NO: 21 - protein, 734 aa, Eisenbergiella tayi
MKEISASSAKRAKELLKQMSMEEKLYQLSGCMIFDIGETYDQCRNPLYGNYRSAGHFMHWKRKEPAAPSEVAARINQDIRASIEAQPHGIPPLIHEEALHGAQWGMATMFPQPIGMASSFDDELVQEIGEIIGKECAAVGVRQVLSPVVNIARDCRWGRLMETFGEDVLLSSNMGAAMCKGIRKNGVIATLKHYADNYSYGGRDSNSSDSSERVMREVYLPPFEKCIKEGDALSVMAAYNSWNGVPCSCSRELLTDILREEWKFPGFVVSDYKGVEGVCSSHHMTGEEYQAAALCVKAGLDVNLPAASGFSLLKKAVEEKILSQEDVDKAVYHVLAVKFEIGLFEQPFGDEKEAEKIVRCEAHEKTALEAARESIILFKNENVLPFDRNRTCRVGVFGASAAEVPLGRNYSGPYKRRWEAQDAKTPLQFLKEYLGEDTEVVYSPDFDEELAKGCSAMLYFTTIIEGEGLDRCNICLPSDAMVHQVDGGGLIVDKAEASVFGNQEEDIRKMFHTNRNSAVILLNGSPVDMTGWIDSASAVLEAWYPGEQGAQAICEILFGDYSPSGKLPVSVPKNVGQLPLFYAHKPSGRGYHYNENDGNPLYPFGYGLSYTTFGFGSFSQYIKEDEILISFVLENTGHYDGTEVVQVYVSGRNCDVVMPVKELKAYRRVTLKAGEKDNVCITLPAASFQYYNQGMKYSLHNGDFTVMTGNSSENMFNEFSVKIREGRIFLKDSE

SEQ ID NO: 22 - protein, 739 aa, Unknown
  Streptomyces sp.
MPAVGISPAAPVSHGTGRRTPGPRPVTRGIVAAMATALAATLLAFVPATKAEAAPVLLSQGKPVTASSEENYGTPATAAVDGNANTRWSSAASDPQWIRVDLGATTRLSQVVLDWETAYGKGYRIELSTNGSTWSTAYQTTTGDGGTDTLNISGEARYVRVYGTARGTGYGFSLWEFKVYGESGGTGGPQLPGGGDLGPNVHVFDPSTPNIQAKLDEVFDQQEASHFGNGRHQFLFKPGTYNNLNAEIGFYTSISGLGLKPDDTTINGDVTVDAGWFNGNATQNFWRSAENLAVNPVSGTNRWAVSQAASFRRMHVKGGLNLAPNGYGWASGGYIADSKIDGQVGNYSQQQWYTRESSIGGWSNSVWNQTFSGVEGAPATSFPEPRYTTLQTTPISREKPFLYLDGNTYKVFVPAKRTDARGVSWNGTPQGTSIDLNQFYVVKPGATAATINQALAQGLNLLFTPGIYHVDQTINVNRADTVVLGLGLATIIPDNGVTAMKVADVDGVKLAGFLIDAGTVNSPTLLELGPQNSSADHSANPTSIQDVYVRIGGAGAGKATTSIAVHSDDVIIDHTWVWRADHGEGVGWETNRADYGVRVYGDDVLATGLFVEHFNKYDVEWYGERGRTIFYQNEKAYDAPNQAAIQNGDTKGFAAYRVDDSVDVHEGWGMGSYCNYNVDPTIRQDHGFKAPVKPGVKFHSLLVVSLGGMGHYNHVINNTGASTVPAGTSTVPSTLVSFP

SEQ ID NO: 23 - protein, 546 aa, Unknown
  Firmicutes bacterium
MGEDPYLASAIGKSFVEGIQSTHEVMACAKHFIACSSSVNGKDRGPVDISERSLKEVHIPPFKAAIDAGLGMIMISSVEVNGTPALISKWLINDILRGELGFEGIITSDWGDVIKLYDYHKVCPTIGEALIKTINNGVDMIMAPVDLNYVDLLEQNVNNGRIPLSRIDDAVRRILKAKFKFNMFNKESCDIVQARETILSEEAKNAALTAARESIVLLKNEESLLPLSKDIDSILVVGEAANCRRHLCSGWTMVWQGAKEEQLISGETILDAVKSRVSSETKVEFIEDYSDKEKIKKAAAKSGVCIFVISEQPYAEWFGDVQDLQLPEEQFEALKFLHACEIPIITVMISGRPLKTSWAAQNVNSLLWSCFPGTEGGSAIGDVIFGEYNPSGRLPVSFPKDDSPLPCVYNSRINTKYEPLYPFGYGLSYTEFEYSDLVLPDCVSENQEFEVSVNVKNTGRVSGEVIVQLYIHDSYISVTRPEKQLLAFDKVFLEQGEEKKVSFNILSKQLCVLDESMELVLEPRVIQLQIGDKTGKVQLYNCSQKN

SEQ ID NO: 24 - protein, 782 aa, Unknown
  Tenericutes bacterium
MKYKVIIDNLTPEEKVRLITGKNVWETYPIERLNIPSVFMADGPHGIRRQVDTGDNLGINQSYPSTLYPSSSLSGCSFDENLMFELGKHLAMEAKEQGVNLVLGPGINIKRHPLGGRNFEYFSEDPLVSGRLAKAWIKGIESEGVGACVKHFTCNNQETNRFLMNSLVDERTLNEIYLRPFKIALEAKPSALMTSYNRLNGRYVHANADLIKKVRTEWGFQGCLISDWGAVDDRVASLAGGLDLEMPSSGDYYFNKIKQAIKQKTLSERSLDEAVNHVLDLVFKLGPKKPLKPKGGNESKYHELAYRIASESMVLLQNKGILPLKKPEKVMLIGDLLKKPRLQGGGSSHIIPRKVDYVLDLIDNYASDLTYLENETDVLKGNCQTELEQAEKIILVLGLNEEDETEGTDRVTLDLPLKQRSLVEKLKPYLGKTVLVLMTGSVVIIPERENFGGVVLAGLMGQAGAKALLDILYGTVNPSGKLTETYADALEDYPATPFFGGKTENVPYAEGIFVGYRYFLTKPKEVAYPFGYGLSYTEFRYQTIKGNRSTLTEGTNLKVTVSVANVGAMAGKETVQLYLRKVNSRIIRPNKVLIDFQKVLIQPGKTAELDFFVPSDAFAVYDEKVHDYIIEPGEYEIIAGGNCLDEPLVFKVFFGKETEAQINPESLDEYMRVEGLAQRMGSLPTIPKRKRPYTLNDSFRILRKNILGRLLFAVIKNQALKLSRRSREAWMKKVIKATLLDTPLRTLAVMSSGALTLKQAEGLIDLINGKFSSGIKKLKNKA

SEQ ID NO: 25 - protein, 801 aa, Gluconobacter oxydans
MTHAFGREAATIVAQMTIPEKLDLVCGNGLWRTTGVPRLGLPSLLMVDGSNGLRVVPDQISTDTQNADLGAFLDAVDTTDDPENRDSNVLLGKSVPATCFPALSVLANSWDIALAHEVGTALAIECRAAGAQILLGPGINLRRSPLAGRGFEYFSEDPVLTGEMAAGVIRGLQDRGVGASLKHFACNNSEVERISMDSVVEPRALHELYLLGFERAIARSSPWTVMTSYNRLNGIQTSQNPWLLRGVLRGRWQYDGAVMSDWHGIQDLPAALKAGNDLDMPFNAARRRRLENAVLNGSMPETTLDEACTHIAALTLRIVDAQRRLPVTRPDFAAHHDLARKAASRACVLLSNRNDVLPLTPEPGERLLVIGTGAVSPEIQGAGSAAVRPIQCDIPLECLKATAPEGVSIRWEPGWSADGDHDAQRLAAALAAACTAETVIIFASTPPCVSGENADRPDLNLCPAHDDLITELTKIHDRIVVVLTHPDAVVLPWADNVQAILSAGYAGAGFGQAVADILFGHANPSGKTSVTWPVRPEDCPAFLGYPGEQGTHLYREGIFVGYRFFDIRRIQPLFPFGHGLSYTSFTYDVLELATEGEAVTVRFTLSNTGTRAGWEVCQLYLGRSPNAPNRALPHHPLRALKGFATVHLEAGESRVVDMTLDRRDLAYFDTVREDWTVPTGTVSIEIGASSRDIRLVTELHVAGDATPARWLNLHTPPGQALEVAGVQDDLVTWLADVTGASIAEIETRLAPCCRSFLGIYDTLCWSFGLELDETRLTQILDDANRRSGARKPGHRSELDPS

SEQ ID NO: 26 - protein, 399 aa, Bifidobacterium catenulatum
MVLGIDERIDGVNLGNWLVLEKWMDPKPFTRSAEDDEIWMHRTHVSLWSERNLAEELRRHRETYVTLEDFRIIVGHGINLVRIPIPYFIFGDWPGHPGCITYLDRAFRWARETGLKIMIDLHTVPESQNGFDNGGLTGVCKWAQNTDLVEYTLNVLERLARRYRDEPALHSIEVLNEPVSWSVFHSTSNTAKDSQEASGSAYVSLRFLKRFYRDAYARLRAVLRPETVIVFHDGFRLLRWGGWFRRAGMCNVMLDTHQYLIAMEDQLFSGPARRLYLRSRRLPWLYRMLVGASSIAIRSAARRIPVLVGEWCVENRWALHSQNRSAAYRQVSRLQRAAWDVSAGQIYWSYQLARSAKPGSGEGKPPRDPRNGGNLEAWDLTRVWRHGWIRADTSHDDVP

SEQ ID NO: 27 - protein, 864 aa, Bionectria ochroleuca
MSIKISYEVAPGNIRDQELSLNQAIGLLSGKDFWRTRDFPELQLGALKFTDGPNGARGENWTEGKAAVCFPCATALGASFDRDLLREVGSAIAVDARGKRANGLLAPTVNIHRYILNGRNFESYSEDPHLSGFLAAEYINGVQSQNVAASPKHFLGNEVENGRRWSDSVIDERALREIYLEPFRLLCKHSSPLCLMTAYNAVNGEYCSESPTLLRIVRDEWNYDGVIISDWFGTYSTSEAINAGLDLELPGETKFRTQQKMTEALERGQIDPAHLTTILQRVVDLLQKTGRIGLSDAEDARGTLPELPSVPNAGTSALLRRAAADGMVLLKNKNNALPLSASAGNNIAVVGKPAAEPSIFGGGSASLKPAHISTPLEALCQRYPSLVYSEGVAVQRLVDLSCQIKVPESDVQLEWFNSSEPDEKQLFRDEVVPKSEYMMMEDIHAGLADLRSFCTRMTVMIQPPVTGAYRLSMTSPGSQTCYIDGKVVGTVARGAEVVTEDYIFNRARLEQRIDTPIHLESSKQYKLTIVTQSAKHSPVHINREFYVQGSRVGLAPIPDDDKDIADAAAKVSASGAAATVVFVGTSTQWESEGFDRVSYSLPLRQNDLIRAVAKASPGPTIVVVNAGSAVDCTPWIDEVDAVIQAWFPGQEYGSAISDVLTGRVSPSARLPTTIPRSMEGTCTGDLTGKTEGDKGVQKRIVYQESWAVGYRAFGGNRDWYNPLFAFGHGLSYSEFSYGATKQELIYGDDDISLAVSVPVKNTGAVKAAEVVQLYVQPPQGSVERPIVELRAFAKTQRLASGEEQTVQLQLSKEAFSFWDVETHSWKVEAGEYTVLFAGSAGVGDWIDTGERLAITVDKTFHWSA

SEQ ID NO: 28 - protein, 411 aa, Unknown
  Parcubacteria sp.
MSDKFKFPKDFLWGAATSSYQVEGGNSNADWWQWEKQGKADNESGLACDYWNRWKSDHDLLMELGVNSFRLGIEWARVEKADGVFDEEAIAHYREIFQDLKKRNIKTQVTLWWWTSPIWFQENYGFHKKESVEIFARYVKKITDELGDLIDVFMVLNEPMVPLGQGFLAKAFPPGYMNPFKFLRAVNNLSGAYKRSYEIIHKKYPDAQVGITYLYNWYESEGFGILLNSINRIAQWYRIDLFGNKIKGYQDFVGIHYYRLGKIRFNWRNVKMDSRNQIYMGFTIDENPENVMKWISYPEGIYKVLKQASGKFKLPILISENGVPTRAGIDDEERIEYLRSHLVFVHKAISEGIDVRGYNFWSLMDNLEWLYGYEPKFGLIEMDFKTLERKPRKSFYEYAKICKSNELEIEE

SEQ ID NO: 29 - protein, 797 aa, Microbacterium ketosireducens
MSTMHTHLDASLSPEKRATALLGAMTLREKAFQITSIAPWNYVDSAGQRVAAADSYVQRGAGFICNFGVDDPQSMAATVGGLQRVAIEETRLGIPMLVQAEALSGFLSGGHMVFPTPTGLAATWSPDLVEAMTDVIRRQMTRVGVRHALSPNLDLGLDPRWGRVHETFGEDPYLTAAMGVAFVRGLQSDDLTQGVIATAKHFIGYGAPEGGSNLAAYEGGSRRTRDLHGFAFEAAIHLANLQSVMNSYSDVDAVPAGASRAVLTDLLRETFGFDGFVSADYGTIEQFVDRQRAALTPGEAGRLAIHAGLDTEFPVPFGFGEALAAEVEAGRADVADLDTAVHRVLTAKFRIGLFENPYPHERIDVASVAAEGVDVSRELARRSVVMLENDGILPLSPSAKIAVIGPHADNVVNQFATYSYPAFRDMMVHMSSGGMGNMIGVDPAMVEWNNTVFAGGPGEHYVRDRLGARSLGEVLAERAASVVVERGASLTADLTDAEFDRAVATADGADIVILALGGASLWFNGERTEGEGSDSADISLPAAQTRLADAVAATGTPVVTVLTQGRAYVLPESVRASRALVVAPFGGPFGPDAVADVLFGEVNPSGKLAYSIPRSPGQIPVYHHQRSGTGYRKPLPPDVTHHYLDTEATPLYGFARGESFTSFELIDLEADRTMTTDGSVRISATVRNTGGRAGATVVQLYAGAFGLGVTRPAQQLAGFQRVELDASASVRVSFEVQARQFGYTALDGAFTVDPGPLKLWMGFDSETPALATEIEVTGARLPLKSGERSFLSVVTVG

SEQ ID NO: 30 - protein, 744 aa, Roseburia faecis
MEQRKLKQLLSEMSLREKIGQMIQLTGIYFDDDAVLTGEVGEDQPPQWVTQYAGSVLGMIGAEKLRGIQKKYVEAHPHHIPLLFMADVIHGCRTIAPIPLGQACSFHPELVRKMAGHAAAESASEGIRATFSPMIDVSRDPRWGRIMESFGEDPFLNGVMGTAMLRGYQGEEGKDPAGNKKIPESGIAGCLKHFAGYGAVSAGREYNDVEISQRTFREQYLKPFRMAMHADPAMVMTAFNAVDRRPVSGNKELLEGTLREEMGFSGTVISDWGSIGQLEEQNVVSSQKEAAEAAVRAGVDIDMMSPAYMFHLEELVKEGSIPTSLIDKSAWNVLVMKNRLGLFENPFAGMQGEEPLSAEAKKTALALACESSVLLKNDDMLPLKPERKVFWGGPYVESRELLSRWAIFGRYDDVETIREVLKARKMPVRFLPECEILTEEERRLWQAENCRIQDSGEQDKEIPEICVNSGKQYATLDEIEPEDTVVLVLGEHEAQSGEAASRAFLDLPEGQQKFFDAVAGRTSHIVTVILSGRPLDIRKIAEKSQAVLFVWRPGTMGAEAVVRLVYGEETPSGKLSVSIPWCVGQVPVSYWDVKTGHRMVETNPENRFTSRYMDIPNEPLYPFGFGLSYTEFTITPPIFEKQEREDKIDISCKVKNVGEVPGAEVVQCYVETLCAPVVRPDRELIRFRKIFLLPGEEQEVKFTVNRKELAFYGENMELIDGDVQFRFIVGNSSRSEAGSILYAF

SEQ ID NO: 31 - protein, 859 aa, Kwoniella dejecticola
MGDTANTWLKPDFDIEQVLANLQTLDRVHLLRGGNGFSSAKLLNHGIPPVRMVDGPSGCRGTVIYNGTRANCFPCAVGIGSSFDLGLVKDMAKQLAREAHAKSSHILLGPTLNIIRSPLAGRGFELFSEDPLLVGKMGATYIKSLQEEGVANEQEFNKHTAETVVSDRALREIYLEPFRIAVREGDPWSTMMSYSKIHGVHGCDSKFLIDDVLRKEWGYGGTVISDWYGTHSTSRSIEAGMDLEMPGPSIWRTDAQVLSHLEANMIDKKAIEKCVRNMLKLVKRAIQSKIPFEGPEVALDTPEIRALLRRAAANAVVLLKNDLQVLPIGNNKHRKTPSKIAVFGHNAGQHFSSGGGAASVPLETFSNSPLSGIQAAAQEISAEVTYSLGTVAYQYVPVADRYLSVPSRDGVSGVARIEFWSEQPHDEWKTTKGNIVIEKPSDHDMISPTARCFMHDGVPDHIGKDGHYVRFTSSFIPDQDGDWRIGLASIDRANLFVDGQLVIGYDDNLKDGTMFFHFCHEERSCVLHNLKKGQKYQVELRCWDTTKLHSLPVKMPAGFSIGLVRELDPQGAIDEAVALAQTSDECIVMVGLNKEYESEGYDRQTMRLPGTSDKLVEAILAVRPDAIIITQSGMAVEMPWAEKAATILHAFYGGTSLGDGLADVLFGRVNPSAKLPMTFPKRIEGSSSYPHFAHLSPSHKQVVYAEDIYVGYRLLDRSPERIRFPFGHGLSYTTFAYSDLVIEAASEFGQFTVKFSIKNQGSLFGAESAQVYIRPLSSALPRPYKELKGFTKVFLTPHSSAQAKVNLDRSAFAYWDDREDGGSWIAEQGEYEVIVGASSLDLRLKAMVTLDRTEIWRGL

SEQ ID NO: 32 - protein, 802 aa, Unknown
  uncultured Clostridium sp.
MSIRLTDKASVPAVVAEMTLEEKARLVTGEFPFTTAGIKRLGIPPMRPLDGHTGINMGQLRSDMASKTLANKSVDELGEMSGPAISGFGTVITNAKDPAKRAKMAPSIQKLVQEVLDKVDELMPDGMYPGCFPPGIMQGSTWNPEVIEKEGSAVGKEMDAYKVDVCLGPNVNIHRDPLNGRLFEGYSEDPYVTATLAPYYIRGMQAEGVAADAKHFAANNQETHRQEIDERIPLRALYEIYLPGFKAAVQQGKVKTLMSAYNKINGTACALNHWLLTDVLRGEWGFEGFVVSDWGAVYDQVDAINAGNDLEMPGPLTFDKIVAAVKDGRIDEKTLDQRVANYLNVLVELPVMKGRKNAHIDREYSRKAAYDVAAEGSILLKNEGALPLNEGAKISLIGEHAKDYIICGKGSAFIDTDQATNLYDCAVETLGADKVEYGDVSADSDAAIIVVSVDGQEGSDRADLLLAPGDDQMILDAAKKAHANGKKAIVILNVTGPVEMEGWLDQVDAVLCVWLPGMEGGRATLDILTGKVNPSGKLTLTFPKHYYDCPTYGNFPGDGDEVWYGEGIYVGYRYYDKKHVEPLYPFGYGLSYTTFELSDIAIDRDVMDMDKGETVNVSVKVTNTGKVAGKEVVQVYISDEVSTLSKPLKELKGFQKVALQPGESKVVTIAIGKDQLASYDPAAKAWGSEPGYYQALVGTSSRDIAGAVRFKAVGYNPFGYGVNCSIGKIMANPAVVEAMKKYIPAHLLSDESMSSELTYFPEAKLQKIWNEKFSLAFKDKSETEKQAILDAMCAEIAKIEVI

SEQ ID NO: 33 - protein, 824 aa, Cyberlindnera jadinii
MCFDVEEVLGQLTIQEKISLVSGVDYWHTAPVHRLNVPSIRTSDGPNGIRGQHHFNSTPTAAIPVGTALGATWNKELLYKAGQLLEKEARAKGAGVVLGPTVNIQRIPNGGRGFESFSEDPLLSGELAASYIKGIQYDGVAACIKHFVGNDQENERFSSNSIISDRALREIYLKPFEIAIEKAKPLALMTSYNKVNGVHASENKILYSILREEWGWDGTVMSDWTGTYSTAEAINAGLDLEMPGPAKFRGVLLQHALLAKTVSLRALDERVKNVLRLVHRVQASQIPERAPETERNLPEDRKLLKELASEGIVLLKNEDNVLPLNRQKKVLVVGPNAPYAIYSGGGSALSTPYYYVSPLEAITSIVGDEKVVYDFGAYNHKYLPSLAQELFNGESNGTLIELFNEPPSVPGRTPFDTIQFKNINYFRMNDYTHPGLKSLRFYATLTSTFIPQHDGEYTFGIAVDGTANLYIDNELVIDNSTNQKLGESFYGSGTVEVYGKYQVKKGKSYALRIEFGSSATSNVSGNRTFSGGGGLRFGGLKIVPNPIETVLQKAKDYEQILVVTGLNHDHESEGSDRDDLKIPGESNKLIEALLEANADTVVVIQSGTPVEMPWASRVKALVHQSYGGMEGSNALADVLFGNSSPSGKLPITFPRRLEDTPSYINNTTQNGRVLYGEDIYVGYRYFDKVSRDVLFAFGHGLSYTSFELTGLVVNVNGDLLEASLTARNTGQLQGSVVVQLYIGKADSKGRPVKELKAFEKRSLKSGHEQLITFSVPLKTSTSYFDEEVQKWLSSAGEYNVIVGQSSDDVKSVTQAFTLHQSIVY

SEQ ID NO: 34 - protein, 594 aa, Unknown
  Bacteroidetes bacterium
MRSMNMHWTFNPNIEVARDPRWGRVGETFGEDPYLVTQMGIQTVKGYQGDLNSENDVLACIKHFVAGSEPINGTNGSPADLSERTLREVFFPSFKAGVDAGAMSAMMSHNELNGIPCHSNEWLMTDVLRKEWGFKGFIVSDWMDIEHLYDLHATAENLKEAFYQSIMAGMDMHMHGIHWNELVSELVKEGRIPESRIDESVRKILTIKFRLGLFEHPYADEKTTMKIRLNPEHRQTALEAARNSIVLLKNDGILPLTEKYKNVLVTGINANDMNILGDWSAVQKDENVITVLEGLKMVSPNTYFEFVDQGWDPRNMSPEKVNEAAEKAKSSDLNIVVAGEYMMRFRWTERTGGEDTDRSDIDLVGLQNELIEKVAASGKPTILILITGRPLGVEKAVGKVNALVQAWEPGMYGGEAIAEILYGKINPSAKLPITIPRSVGQIQMIYNHKPSQYFHPYVVTSSEPLYPFGFGLSFTTYKYDNLQLSGSEISKDENLEVSVDVTNTGKMDGTEIVQLYLRDKFSSVTRPIKELKDFARVTLKTGETKTVHFTVSPDKLTFLDKNLKPVVENGEFIVMVGSSSREEDLLKQSFYVKE

SEQ ID NO: 35 - protein, 833 aa, Unknown
  Verrucomicrobia bacterium
MSEPDVENRINGLLKQMSLEEKTSLLHGNSKFNTAGIKRLGIPRLHLSDGPHGVRRETEEHSWGPVGWEDDYVTYLPTGSALASTWNPALGRLFGETLGAEARHRNKDVILGPGINIVRTPVCGRNFEYFGEDPYHVGKMAAEVVRGIQNNDVAACVKHYALNNQEWNRGWVNAIVDERTLREIYLPAFEETVRAGALTFMGAYNRFRGQWCCENKYLVNDILKGEWGFDGVYLSDWGGVHSTRDSALNGLDLEMGTSDNYDEFFFARPLREAVEGGEIPESVVDDKVRRILRVMARIGALDPATRKTGARNTAAHQKAVRAIADEAMVLLKNDGVLPLDIHKTLKLAVIGENADKKHADQGGSSAIRALYEITPLEGLKRRGGDMVKITYVQGYRDTGDAAAFEPIGEPYVQTVDPKAGVRCWKVEYFNNRDLHMPPVTVRYEKSVDFDWQERSPAPNVSEDNFSARMTAEIKPTASGTHHIGLTSDDGSRLKIDGKVVIDHWGDHGEEQKDARVELVAGQTYRFEVEYYDSGKGAMLKLGWVTPDSSAADPEVVFAAALEAAREADAVLVFAGQNHRYDTEGVDRRDIRLHGRQNDLIEAVAAANPRTAVFIISGSAVEMPWIDKVPCVVQAWYAGMEVGNAAAGIVFGDVNPSGKLPITFPKRLEDVPAHSIGQYNDQDCEYREGLLVGYRHFDTRNAEPLFPFGHGLSYTKFTYGNLKVDPATLEVRVSVKNTGARKGKEVVQLYVHDVQSRLPRPVKELKGFEKVELAPGETKEVAFRLDERALAFYDADANRWVVEPGDFDILVGSSSRDIRLKGRLAYAGRKKGPL

SEQ ID NO: 36 - protein, 728 aa, Unknown
  Bacteroidetes bacterium
MTHNRYLKILVLLITGTFFVPRLGAQHHTFHNTDLSDSIRVDLLLDMLTLEEKINLLSTNLGVPRLGIRNAWHSEGLHGMALGGPAHWGGKEDSPTSTFPQAYGLGSTWDTALVKKVAEIEAQEIRYYTQRTPEPKGGLVMRAPNADLARDPRWGRTEESFGEDAYLASRMTVSFIKGLQGDHPRYWKSASLMKHFMANSNEDGRDSTSSDFDERLFREYYSYPFYKGITEGGSRAFMASYNAWNGIPMTIHPILNSITRREWGNNGIICTDGGALRLLITAHKAFPTLWEGAAAVVKATVGQFLDDYLLAVNQAITYGVLTEGDIDKAIRGNLYVALKLGLLDSPMDYAAQPYTGIGVSQMEEPWEKQEVKDFVRLVTAKSAILLKNKPAGGERTPLLPLNSAKIRSIAVIGPRADEVIFDWYSGTPAYTVTILEGIRNAVGPDVEVFYEPSNSMDKAFIAASKADVAVVCIGNHPYGTNARWFYSPVPSDGREAVDRKALTLEQEDLAKVILKANPRTVLALVSSFPFAINWSQEHIPAIVHITNNSQELGNGLADVLFGKVNPAGRTTQTWVRDIADLPPMMDYNIRNGRTYMYFKGEPLYPFGYGLSYTSFAYGSLKMPESFTDTVQIEVMIRNTGPLDGEEVVQLYVAYPSSALERPVRQLAGFERVLVPAGETRKIILSLKASDLAYWDVEKQRFAVEKGKVRVLVGSSSADIRSEGILEIM

SEQ ID NO: 37 - protein, 709 aa, Lichtheimia ramosa
MALAAPTSNLLTWDEAYAKAEALVSKMTLEDKVGVATGKGWEKTLCVGNTFESDSTDFPSLCLQDGPLGVRFGDNVTAGLSGITAAATFDRDLLYKRGSYMGREFYLKGVNMALGPCVDIMRSPAGGRGWEGFGEDPYLQGVAGVETIKGIQDQNVIAVAKHFVLNNQETNRKNSSSNVDDRTLHEIYIWPYARMIEAGIGGLMCSYNQIDGTWACEDEYTMNTVIKQQHGFRGLIMTDWGAQMSGIPSALAGLDMTMPGDIVMGDGYSWWGPNLTKYVEDGDVPEDRVTDMATRITAAWYKMGQDKDFPEVSIRSFDRDSAPEVLVDADGEHAKIVREMGAAAAVVLSNDGVLPLSDDLKKIAIVGSDAGPIPMGLNNCSDQACGAGTLAMGWGSGTADFPYLITPYDGIKSRAGDGVEVVHTYDDWDLDKAKDISKDADVAIVFSNADSGEEYLEVDGNVGDRKNLTLWHNGDNLIQAVADANENTIVVIHAVGAVLMPWIDHPNIKAVVYPGLPGQESGNSLADVLFGDVNPSGRLPFTIAKKEEDYPAHIGHDFNVEYTEKLQVGYKHFDANNIEPLFPFGHGLSYSKFEYSDLKVKANKKANKDGVLATATVTVSNQGDRDGAEVPQAYIGFPEDAGEPPKLLRGFDKVFIKKGKKAKVTFEFTEVDLSTFDADSQKWNVVSGEFTVYVGASSRDIRQTGKFTL

SEQ ID NO: 38 - protein, 504 aa, Bifidobacterium mongoliense
MIMTTPNFYEGALNAIHRGLITESDLDRPVRNVLRLKFELGLFEHPRTPDQARIAAAIGTREHTELNLRMARESLVLLRNDGTLPLNTQGSNVSTTAQSFSSVTHDTKPDQQKPIAAASVANQHTIALIGPLADDPKNQLGDWAGGSGQVSWIKEEPRETVVTVRDGLQEALPHNYSLTYAKGANILTLEADPAGATFPDGQPRPPIQTPCAPDPHMINEAADAAANAETTIVVVGDVIELVGEGRSTATLELFGAQTALLEAIAQTCHDNHHPWIVVLMASKPLVLPQCTSQAAAIIWAGNPGMQGGRALAELLLGKIEPQGRLPISFARHSGQLPIYYNQIRGQHGSRYADLTQEPAFSFGEGLSYTHVDYSNPCLSVEGRANDNIHGGRLQDVHMDDILRITVTLHNTGQRPCVETVQVYVRDVVTSVSWADKELKAFQRVPLEIGQEARVSINLPVSNCTIVNAEEKRVVEPGDFDVMVGHSSKPDDLLPVGFTVVAENR

SEQ ID NO: 39 - protein, 495 aa, Vibrio ishigakensis
MYLPAFEAAVEAGVATLMTGFNDLGGTPTTSTKDLINGWLKSDKGFDGMVVSDWGSIADLEYFGVSADKKAAAKKALLSGVDMAMTNEAYEGHLEGLVSLEPALEDAINEATSRVLLAKFKAGLFEKPYVDPNVHKHILRHPEHIMDALELAEQSMVLLKNRDNLLPLSDKDLKVAVIGPHAHSKRQHLGSWCLDGKAEDVTSIAEGTAKIAPNIDLLTEESSFSDEMVECAHRADVVVLCVGESHRRTGEARNIAELTLPPGQEQLIEAIGQTGKPLIVVQCTGRPVPSPMTERYADALLQAWQSGTETGLAVARLLFGQAVPSGKLSMTVPRSTGQIPMYYGRKQIGKKRDFLDYMPYKDSPESPLYPFGFGLSYTQFSYRNLSVERSTLGTEQTQTVSVTVENTGGVAALETVQCYIRRKAATTTRPLRELKAFEKVHLAPGESRVVEFELTPKQLSYYGAEKCFKNDEGDIEVFVGSSSEAKHSVSFAVKD

SEQ ID NO: 40 - protein, 646 aa, Phaeomoniella chlamydospora
MSAYNKVNGIHVCEDERFLREILREEWGWNGLVMSDWFGTYSTSEAINAGMDLEMPGPSRWRGEQAFVAASSDKSRPTALDDCARRVLNLVNECVRSGIPENAPELARDTPETTEFLRRLAAESIVLLKNDGGILPLKSHKKTLVVGPNARLARYCGGGSSELIPYHAVSPLEGIQEKIGAENVTFTIGAHSHKDLPDIARLLIPTLDSTENGVTFTPFNDAPGVKDRKPVEELLVRTSSMILLDYNNPKLAQLWYADIEGYLAADRTGEFQFGLCVFGAARLYVNGTLLIDATEVQKPGNAFFGCGTEEVKATLPLQKGDTYHVKVEFFSEPFSKLTPQAVTFPNGAVKVGGAWVINHQEEIRCAAALAREHEQVVLCIGLNNGWESEGFDRDDMKLPPYLDDLAAAVLEANPNTAVVVQSGAPVEMPWLSSTSALLQAWYGGNEAGHGIADVLYGDVNPSGKLSLSFPKKIEDNPAYFNFRCEAGRVLYGEDVYVGYRWYEGLKRPVNFPFGFGLSYTTFKFEDLSLKMDNESLTISVRVSNTGNVDGAQVLQIYVSHKNPSIRRPVKELKEFSKVFLTKGTNKTISLDIPLKYACSYFDERRDQWIFEKGQYTVIVSDSSRLETGKYVEADFKIDKTIWWSGM

SEQ ID NO: 41 - protein, 843 aa, Ardenticatena maritima
MKGARMQDRVETLLQSLTLDEKIKLLAGADTWHTHAIPRLGIPALKVTDGPNGVRGTQKDTRSQTSASFPVGTAMGATWNPDLVREIGEALAEEVKTKGAHVLLGPTVNMHRHPLAGRNFECFAEDPYLMARMAVAYIQGVQSQGVGACIKHYVCNDQEFERFSISAEVDERTLREIYLPPFKAAVQEAGVWTLMTAYNRVNGVYASENSHLFDILKDEWGFDGLALSDWYGTYSDRVPLERLDLEMPGPGRWMAPEKVRAALERGEITEADIDDKVRRLLRTLERVGAFEDSAPKEERSVDNPRHHEIIRRAGREAIVLLKNEDNVLPLDASRFPRLAVIGRPATEVSFQGGGSSEVNPHYVVQPLDAMRERYGEAFQMTYALGPAFYRNFPLLDTRGLRAEDGTPGKVTVRQYDNTELEGEPSKVFLAEGTQLAWFGEQISEFDLRSFSLTMSGTWTPPVSGTYTFSMATVGRGRFEFDGKTLLDWWEYIPEEQPQNFDGMVSVPWRQEEVTLELEAGREYPFRVDFAVVPGGRWRTIRLGVLPPQPADPIGEAVALAREADAAVVFVGLTPEWESEGSDRESMDLPGEQNELVARVAEANPNTIVIVNAGSPVHMPWLDKVKAVLQVWYLGQEMGNAITDVLFGEADPGGRLPTTFPKRLQDSPAYINYPGENGRVYYGERLYVGYRYYDKKEIEPLFPFGHGLSYTTFSYDALELAADQVRVGEGVDVHVTITNQGARRGQEVVQVYLHDVESSLPRPPKELKGFAKVTLEPGETRTVTIHLRPDAFAFYDDKRGAWVVEPGAFEVLVGRSAADIRLRARLDIVDKTTEALEAGNVLAG

SEQ ID NO: 42 - protein, 800 aa, Coprococcus comes
MEKYRNKDLPVEERVEDLLDRMTFEEKIDQITCLVTIADDIPEFENYIPNGIGNVGAFTVADTVEPIVEYADKLQKYLVNHTRLGIPALIHCEASAGAQFTEADVFPSAIAQASTFDTEVVGEMTDIIRKQMYYVGFRQALSPVVDITRDPRWGRITETYGEDAALTSAMASAFVKGIQGDELKEGVLATAKHFAGHGITEGGLNMGRNIVSERDMREIHCKPFQCAITEAGLKSVMNSYCSVNGEPVVGSKKMLTDILRGEMGFQGFVVSDYLSLDRLVDPFAVAENFEEAGIRAIQAGLDVEYPRSKGFSYKMKESIESGRLSMDIIDQAVRRVLTQKFELGLFENPYPDLEKLKKYLHLKSADELNEKIAAESFTLLKNENKTLPLSKKIKKIAVIGPHADNIRSLFGTFSYPAVLDMTMSREEDGQEFEEPGLIIYDVEQKYKGEIREVSPRVNRKIQKEFPNSRTLCAALKEYLPEAEVVYAQGINCSGDNTGGMEEALQVAAGADVILLTIGGKNGWGVTSTVGEGIDSTDIDLPGRQEEFARRVYDLHKKTVVLHYDGRPLSNEFVASHFDAIMEVWQPGEYGSQALCKVLFGEQSPSGHLPVTVARNVGQLPVYYGLPRGSGYVSAGHTGMIRNKNGYINDTAEPLYYFGHGLSYTEFTYSDLQTDKKNINPDDTVKVTFTVKNTGEYDGAEVAQLYFSDKVASMVRPTKELAGFVRIFLKKGEKKKVVFEIKVSQFAFLDEEMKWKVEKGEIELLAGSSCEDIRLSDIVSISEDDYIDGKTRGFYAKAVVC

SEQ ID NO: 43 - protein, 393 aa, Nocardioides dokdonensis
MDGPGEILSADTGGARAPQPDPRDLAARLPRDFVVGAATTEPQAGAAADRHDRHEEDLALLDGAGLDGYRFSVSWRRVQPTGSGPADPAGLDVYDRLLDRLLESGIRPSATLFHRGTPPPLEQRGGWASRDTAKRFGEYAALVGERLGDRVVDWVTLTGAARVELDGPRPGVTGPDLEQIRRAGSVARTVLLGHGLAVRALRSVPVRGRIGITQSGPPLTDDPQDPATAGLLGLLQDRLLADPVLLRCRPELPAGLPPGMRRRLRRATRMSRKDLALVGAPIDFYGLDHELPSPVAADPGGLRRTAEDLAGRYGPRLPPVVITEIGAGLPEPVAPDGVVDDQDRVAHLAEHLDVVADLARGDVPGFRLEGYYVRTPRSSYGWVGELQAARGRG

SEQ ID NO: 44 - protein, 869 aa, Unknown
  uncultured Clostridium sp.
MKSKEAIERHIKELLSEMTVEEKLDELDPNIMGIDWEKIEEPMRRECLEKLEKRRADARVYNALQKYAKEQTRLGIPFLFHEEALHGLHRRDATIFPQQLTLAGAFEPALCEDMGRMVAAETRAKNIHEVLAPVLDLARDPRWGRTEETYGEDTYLSSKLGAAVVRGLQGEDLATDHTVASELKHYTGYGNPIGGLNCAPTTMGRHDVFSYCMPVFEEAFVKAGATDTMCSYNSIDGFPVVSDHEILTDVLRGTYKMPGFVRSDMTAIIMQHTAHHSAATPKEALQKAVKAGVDVQFADYSHEEYRRLMKEMLADGSITMEELDTSTARVLRVKDMLGLFENPYVDETLESKVVHCKEHQDKALEIAQKTVVLLKNENNMLPLSRSIRKIAVLGPNANLPVMGDYCMEPDYHAVTLLEGIREVLGVPAENVETAANASHPEIVYDKGCNILGAEIKPLERWWFNAKPRPAVGITEIDYGFTAEYFNGADFSGEPVLTRLDSQINFNWIYHAPDDKVDSRQFCVRWTATMCSPKSFEGRIGLSSPDSMRLYIDGELVIDGWGEDKEASQMVPFFFESGRKYDVRVEFRNDARGVRVIFGYDHGEETIDRAIRFAKESDLAIVALGDSTETSGENFDRTTLNLPGKQLDFLKAVYETGTPVVLVMNTGRPVSCTWEQEHIPAILQAGFNGEKGGLATAQVLFGDVNPSGHLTMSYPRSAGQIPCHYSRKPAGGRKYVEMDWNPLYPFGYGLSYTTFSFENLRLSASEIHGDESLEVLLDVTNTGSRAGATVAQIYVDDHYTSVVRPIMELKGFQRVELEAGETKTLHFTLGFDELRLLDASYHWVVEPGDFTVLAGANAGDLPLRADFRVV

SEQ ID NO: 45 - protein, 867 aa, Acetobacterium wieringae
MDEGLIKKIRRNMSLEEMVSLCSGRTDWETMGYSKYGIEPVFMADGPHGMRVIENDGALGIPQGKPATCFPPAVLSACSWDEGLLEFVGRTIALEARSLGVDLILGPGINIKRSPLCGRNFEYFSEDPLLSGRLGKSFILGAKDHGVGTTVKHYLANNQETRRMTVDEKIDIRALREIYLKPFEIAIKEGKPMAVMCSYNSINGKFVSQSNYFLTQLLRNEWGFDGIVISDWGAVYDRVRGVLAGMDLEMPGNGGVNNQKIFDRIKEGKLKVTILNEMVERLIRFSFQAKENRRNYATNLEIEPKGHHKIAQLAAVESMVLLKNEACILPIDRTKIKKLAIIGSMAFDPRYQGSGSSKINPYHIDSPYERIKKLVGDEIQLFPHQGYIHDEVVEQIHLAEQAEEVAKNSEMALLFVGLPDHDESEGYDRTHLHLPQKQLALIRKICKVQPKTVVIVQNGGVVDMSWEHQPQAIVEMFLGGQAGGDAIAKLLFGENNFCGKLAETIPMRLEDTPAYINFPGIHDEVVYGESIFVGYRYYDFTKKKVRFPFGFGLSYTDFNYEPIDEPALTIDAEKMVTVRCRVTNSGVMNGKEIVQLYTGKSDTAILRPLRELRAFKKVFIPAGRSAEVSFELGLSDFCYYNPTTKSWEHESGSHQIYIGSSSRDLPIVYPVQITKDLIHPINPLSYLSDFEKTERGQTILKLLLSGFEEIMGDDQTREDDFFMTMLANTPLRKLVEFSNGIFTEECIDKIIELVNSDQSLEGITFEKLVNCTEKKKGFFKSLFGGNEEEYLCIHSKVRDLVEDEDVMQILRNYFGDETFESDYLQMAIKMGICFDKAQKLLPDDFFSDEKLKDIDRDLKVLAKLKKK

SEQ ID NO: 46 - protein, 781 aa, Unknown
  Tenericutes bacterium
MKLKQRVAMLTGKNVWQTFSHKKLKIKSIMMADGPHGLRKQTDNNDNLGLNSSYPATLFPPACAVACSFNKDLASKMGEAIAKEAKAADVQVVLGPGVNIKRNPLCGRNFEYYSEDPYLSGTMGAAWIKGLQSQNIGASLKHFAVNNQETYRFNINAVVDERALREIYLKPFEIAIKEKPATVMAAYNKVNGVYATESKKLLKDILRKEWCYKGVTVSDWGAVSNRPQSLLQGLDLEMPSSGNYNSKKLIKALQDEYIIDNDIDASVSRMLKLVDKYQNNLEEPFDKDAHFKLAQTIATDSIVLLKNDGILPLKPGDKVAVVGAFAKSPRIQGGGSSNVNPIRVGNVIDEINYYTDNYKYFRGYSMENDGYDQKLIDEVVHEALLFDKIIIMVGLPEEYETEGVDRQHMDLPHGHLKLIEEIAKVNPHIIVTLSMGAPVALPFEKEVSAILALHLLGGASGKPVLDILYGKTSPSGRLATTFPLDINDDPTTANFADGNHSVWYQESLFVGYRYYETFKKAVRYPFGYGLSYTTFSYTDLQVSIPEIRVSGPIEVKVKVKNTGKRPGSEVVMLFVQNNTSPVFKPLRELRAFEKVYLEPNEQKEVVFVLNYQDFAYYDVDMKTYHVDRGKYKIQICKHASKVILEKTVTKQDNEIGFNSPYPSAYNDKEYHIEKEDFQKLLGRLLPPKSIIKHRPYTMDSTLEDVKHTILGFIMYRVVLRKAAKLSKRSSNDWMRQAMKKTLAQTPLRVIATMSGGAISLIQMEGLVDLINFRIIRGLGKI

SEQ ID NO: 47 - protein, 818 aa, Unknown
  Tenericutes bacterium
MKNNNQLITRMLSLLTLEEKIALVAGTNFMYTNAVKRLKIPSIRMSDGPHGLRVQGEVNKNGVSKSEPATSFPTASCSANSWNTVLLEKMGRAMGKEASHYNIDVILGPGVNIKRNPLCGRNFEYFSEDPFLTGRLGASEVTGIQKEGIGVAVKHFAANNSENYRFMGDSIVDERALREIYFRHFEHIVKTTKPQSVMCAYNKINGEYCCENNWLLNDVLRKEWGFEGLVMSDWGATHDRVKGIKSGLDLEMPGGTTICRKWLYDAINDHSLNMEELDKAVYNVLNLVFKHQDKERLMEIPWDEHHQLAKEIALEGAVLLKNNGALPLQKDERILVIGELFEKMRYQGAGSSLINPYMRTTAKEVFDNENINYEYVKGYQENKIEPDQKLIDAAIDVAKKYHKVILFLGLTDYIESEGIDRNNLSLPANQLALIDAFIKLEKEIVVVLFGGSVIELPFFDNVSAILNMFLPGQNGGEATYELLYGIANPSGKLAETWPYKYSDVPFYEEYSKNENEVYKESIYVGYRYYLTADKEVRFPFGYGLSYTTYKYSALNVTTEDNFLNVSLVVTNTGTIKGKEIIQVYVAPPKGNTHKPTRELKGFIKISLEPKESKEVSIKIAIDNLTFWAPKEGRFVLEKGEYTVEIGENCRDIVLKETIALGDKIVQAQYSNNIEKLYNKLNPQKISNPLFEEMAGLKIPALPPSKPITLESRFTNLSKTFLGRIFYRAVLNVARKEMKEAKKMIDSPEKENRIKGAFFLKQILESNSLISLSMSSSNHMPYNFACGFRDISNGKVFKGIKQFMTKIKAPDLPSNKEEE

SEQ ID NO: 48 - protein, 704 aa, Unknown
  uncultured bacterium
MEDKIKKILGEMSIEEKIAQLSCVERGTLVDNEIFSKQKACDVLKNGAGHISPILRPYDPSNGTKIANEIQKIATSTGPKVPVIIHDECLHGCMAKGSTSFPQAIGLASSWDPDMVEKIAQIIGKETRVRGIHQALSPTINIARDARHGRVEETYGEDPYLTSLMAVAFIKGLQSQKVIATPKHFAADFAGDGGRDSSATFFSERILREVFFPAFKASIQQAKAWSLMAAYNSINGIPSSSNKWLLTDVLRKEWGFNGFVVSDYGSVWGIYGNHRVADSLAIAGKLALEAGLDIEIPNSPCFSEMLKLAMEGKVSQSVIDQAVERVLRGKFWLGLFENPFSNPEKAEKICDCDQHRQMALEAAEKCMVLLKNNGILPLNKDIGSVAVIGPNANIVRLGGYSGFGIKTVTVFEGIKNKISKRSNVYFAEGCRVNDSSKYGFSKASSIASKADVAIVVVGNSSETEGENRDRCNLDLPGVQEDLIKTIADTGTPVVVVLINGSAITMSRWIGLVDAVVEAWYPGEEGGNAIANVLFGNCNPGGKLPITFPVFTGQLPLYYNHLPCVRRLDYVEIRGNQPMFPFGYGLSYTDFEYKNLKISPEEYSGKGNIKLSVEVENTGKYEGDETIQLYLRDIVSSVIRPVLELKRFKKVHLKPGEKTTVDFSLSIEDLMFLDEKLNYVIESGTFEVMVGKNSMEGLKTTFEIK

SEQ ID NO: 49 - protein, 732 aa, Parabacteroides distasonis
MKKIIGVIACGLFLNAAAVSSQVTDKEKVQMEKRIEKLIKKMTLEEKVGLLHGNSKFYVAGVERLGIPEWSLSDGPHGVRAEINRHDWAYAGWTNDSASYFPTGTAFAAAWNPELAYRRGEVLGEEARWRKKDVLLGPGVNIIRSPLCGRNFEYMSEDPYMNSVLAVAYIKGLQSRDVACSVKHFAVNNQETNRTTVDVECSERALREIYLPAFKAAVQEGGALTVMAAYNKFRGEFCAENNYLVRKILRNEWGFDGVYVTDWGAAHSTVPSMEAGLDLEMGTLIDKYEDWYYANPLIEAVKSGKIPMSLVDEKVGDVLRVMIKTNVLDPKKRFGPGSMNTKEHQQATYDAAAEAIVLLKNQNNLLPLDFSSIKSLAVIGDNATRKHSNGGLSSEIKAVYEVTPLEALRAKWGDKVDIRFAQGYEKLSTFVEGSNNGQSSGTFSSKTQESDALLKEAVEVARTSDVALLVCGLNHDYDTESFDRLNMDIPYGQVELIQEVVKANPRTIVVMIAGSPLNMAAVDICSPAIVWAWFNGMEGGNALVDVLSGKVNPSGKMPFTTPVSLDQSPAHALGNFPGRDLKVNYEEDILVGYRWFDTKGLPVVYPFGYGLSYTTFDYSNLNTDKETYDQADTIQATFTLTNTGDREGAEVAQLYVSDPVCSVMRPVKELKGFKKVFLKPGESRRITLDIPVSSLAFYSEAQSQFVVEPGEFILQLGASASDITQRISVEVK

SEQ ID NO: 50 - protein, 751 aa, Bifidobacterium psychraerophilum
MNAARNGSMHELSLEQQASLSSGASTWTSQPAGDIESMHMSDGPHGLRYQGSEGDSLGLGSSTPATCFPTASGMASTWDRNMIFAVGKALGEEARMLNVSMLLGPGLNIRRSALGGRNFEYASEDPFLSGSYGSAFVKGVQSQGVSAVPKHFAVNNQETDRFRISAQVDERSLREIYLTAFEMTVKQARPWALMCSYNKVNGVYASENRELLTDILREEWGFDGVVVSDWGAVVNRVAALNAGLDIEMPPSNTDDQIVHAVESGDCSRETLDTLVSRVATLAERSKPSRSGDMQSLESCAQEHDAIAREAAQESVVMLKNDGILPLDPSGEGVIGVIGELARTPRYQGGGSSHVTPILLHNLLDELGKAMPQRRLDFAPAYSLQAGDHSTRDDLIAEAVSVAERSSAVIVNVGYAQSDESEGSDKHDIELGDDQQAVLRAVQGTGTPIILVIYGGGVIRLGQWAQSSSAIVEAWLPGQAGGAALADILTGKVSPSGKLTESIPLRLEDTPSYLHFPGSNGVVCYGEGLYVGYRYYDTANVDVAYPFGFGLSYTTFEYSNLKVEPRGACEADVHFTVSNTGRRKGAAVPQIYVRNGMPDRPKHELKGFDRIDLEAGESHDVTIHLDQRAFSVWDTRDHRWRAYEGNYTVELATSSRTIVDESTITIAGDGSVPPLEDMSTIEEWMASPYGAAVLSPLVNRIHDSVPDPSPEMTAMFNQMPLIKLASWNIGLDTAAVERMVAKANALRSAQQG

SEQ ID NO: 51 - protein, 858 aa, Hebeloma cylindrosporum
MAPSDFAKADVEDVLDNLTTEEAILLTAGVGFWHTHAVERLGVPAIKVSDGPNGLRGNHFFMGTPAKCLPSSTALGATWDTKLVREVGLKLLAQEAKSRAASLILAPTCNIQRNPLGGRSFESFSEDPFLSGIIAAAYVNGVQSGGIGTTIKHFVANDKEDDRLAYDSILSPRALREIYLMPFMLAQKYAQPWAVMSAYNRVNGLHVSENPFLLSKILRDEWKFSGLIMSDWFGTYSVDLALNAGLDLEMPGTNKWRSLDLVSRSIQSRKVTLRTIKKRAKNVLELVQKCAQGAPEVLDGDGIERTVDTQESSELLRKVAAESIVLLRNEGAVLPLNPQGLKKIAIMGPNAKAIVLSGGGSAALKASFYVNPYEGIVRAIKESGSEIEIGYSEGARAYKTMPSLDYEMFTTTGERGWIGSWHKHTNDDSFTPVDEVLEERLIDETRIFISTSIPEGITKRWTMKLRGQLKPRERDCTFEFGLTVAGRAKLYVDGNLIIDNWTRQRRGNDFFGCASVEEKGTYDLKANMKHDILVEFCNVRGPADGDEDEVVMDSNPGVRLGGAVVEDSDELLESAIRLAKDSDAVIAIVGLNSDWETEGYDRTTLELPGRTNELIQKLAAVNQQLVVVNQSGSAVTMPWSENVPAIIHAWYLGNASGDAIADVIFGKHNPSGKLSLTFPKRLEDVPAFGHFHSEDGKVRYAEDLYVGYKHYQHKNIEPLYAFGHGLSYTAFNLADLTLSQPTVKNREFHLSTSVKVTNTGSVSGSEVVQLYISLPTTSNLTHPNLQLKGFAKAYDLAPGTSQILDIALDKYAVSYWSELNDAWTVEKGAYVVKVGTASDRLSLEATFEVKNGFEWAGL

SEQ ID NO: 52 - protein, 733 aa, Brenneria goodwinii
MTHPTPFSAINNDPPSPLPAYKNPALPAEQRVQDLLARMTPEEKATLLSGSGWMESAAIQRLGIPAIKMVDGPVGVRAWTGSSAETNRPDADAVKILSTAFPVGIALAATWNTALAERQGQAIARQVKTLGRNMLLAPTVNISRLPLWGRNFEGYGEDPYLAGRMGVGYIRGVQGEGVIASVKHLAVNNQEFQRRRVNVTVDERALHEIYLPAFKAAVQEAGVWSVMSAYNKVNGAHASENKPLLHDILRRQWGFRGFVISDWGSTYSTLAPLNAGLDLEMPGGAARQRFLDSPRAEAEYARGGWLTAERVLAEIKAGRLSQDQVDDHAGNILRAIFLSGLFDHQPAGGGELDTPDQQALARQIATESMVLLKNERGILPLDPDRIKTIAVIGPNAGVARTGGGGSSLVKPKTAIAPFDAIRQRAGAGVNVRYALGVSMAGEDPREDNTLARARQLKNATDLAANADVAIVVVGRYPKLEGEGFDINAMDLPPGQDTLIQAVAGVNPNTIVVLNTGSPVTVSRWLPDISGLVNMWYGGQAGGEALASILFGDANPSGKLPLTFPVSWEDSLAYGNYPGENLQVNYAEGIYIGYRYFDKNNLQPQFPFGFGLSYTTFEYSELAVATVNKGKQIANVTLQVRNTGSRAGAEVVQLYVHDSHSRIERPLRELKGFSRVELQPGEAKTVSFWLELSALAYYSTEQADWVAEPGQFSLQIGSSSRDIRLEAALELKSS

SEQ ID NO: 53 - protein, 764 aa, Aspergillus calidoustus
MGRQAKAKGVHLVLAPTVNIHRSPLGGRNFEAFSEDPLLSGYLASNLISGMQEQGVGATVKHFVCNDVETDRTKVDVIVQERALREIYLKPFEIVIREAKPWAVMASYNKVNGLHVSESKHLLDDILRKEWGFDGVIISDWWGSYSTSESLNATLDIEMPGEPIWRGASRITRAVGCGKVSEETVRASAKRVLDLVNRAIESGTPENAPQEEADSPAYRELNRRAAASSVVLLKNEKSILPLQLSNRPRIAVIGPNAIKNVSSGGGSASVNAYHYVSALDGIKAGVASNASVSFAHGCYSDEMLPLMKTVTVSGAEGLDIDLFPHPFDFDAQPLPSPAATVTSETSRMFFFDCLPPVALPITWALCEGIFEPKVTGEYDFGVATTGRAKLFVEGQLVVDNWSEQKASRAFFGMGTPEVKGRMAMTGGQRYKVSIQYSCISALPDRKPGHLGGGILRIGARLAVDKADLLAEAVQLASAADVVILCLGTDSERESEGFDRTTMSLPEEQDELANAVLEASDQVVVVNFSGSPVAMPWAPKATTIVQAWFLGSELGNGLVDILLGNVNPSGKLPVSFPVTLEQNPSYANFPGQNAVIRYEEGLFVGYRHYTTQGMLALFPFGHGLSYTTFEYRDLVVSSQRFTPQKTSIVFTIVNSGALPGDAVVQLYISPISSTVVRPVSELKGFLKLHNLLPGEARSSELSLQPEHLAYWDDSHHSWVIESGRYRLSLGHSSVSMAIETEILVEERVELRGNSLDMLSDIRPRY

SEQ ID NO: 54 - protein, 728 aa, Bacteroides finegoldii
MDKFIFITLFLVGNVFSVCLAQSYPYQKESIPVPQRVKDLLSRMTLEEKIAELNLIPYYTKDDSICRSLIRAGKVGAFLKANGAELNRSLQEEALKHSRLGIPLVFHEDVIHGYRTITPIPLAESCSWNPELVEQSAAMAAREAAAAGIQLTYAPMVDISYDPRWGRIMETSGEDAYLCGELAAARVRGFQGNDLTSPHTIAACVKHFAGYGAVMAGRDYQETDVSLRKLQEIYLPPFQAAINAGAASVMCAYTSYDGEPLTMNYFMNEEVLRKQMQFKGLLMTDWTTFQHAVTEGAADNGQEAAERGIKSGIDMDMSAKQFIEFLPELVRTQKVPEQLINRAAARALELKFRLGLFDNPFAYFNTEREKQTLYSKESQEDAYQMACQSMVLLKNEDRTLPLSDSKRIALVGPFANTRYHLLGSWNMKGDSKEVITVEEGFKALRTDIPIDVRACDFSGITPAYLSDVCALAQKNEIIIACLGEPSNLSGEAVSTAKIELPDQQMRLLKALKTTGKKIIVVLFNGRPLVLDEVIKNCDALLEAWYPGTMGGKAVAALLTGIENPSGKLSQTFPRHAGQIPIVYNARRTFYTVHHADIPQGALFPFGFGLSYTQYKYSSLVTDKTKYRRGDSVTVRIKIKNTGSVAGREIVQLYIRDEVATVIPREKELKRFASIHLQPGEEKEIRFTIPSADFSIYNNKMEKVLEPGSFTIGIGPNSSELNQTKVYFL

SEQ ID NO: 55 - protein, 810 aa, Altererythrobacter dongtanensis
MTFEARYLDAGLNTDTRADDLLARMTLDEKIAQIGGVWGRSIAEAGSVLEEVAVRVLHNGVGHITRNSMLLAPAELARNNNAIQRWLEHRTRLKIPAIMHEEGCGGLMIRGATTFPMPIGLASTFEPDLAKRIGGVIARQMQAVGAHQVLAPVLDVVRDHRWGRVEETFGEDPMLAGRMGVAYIRGAQETERGPRIACTAKHFIAYSGGQGGLNWAPADFGHRALRDTFLPPFTAAIREAGVGSVMNAYQEIDGVPCGASRELLTGLLRDELGFEGTVVSDYDTLSSLHCYHNSAVDAQEAAKQAIKAGIDIELPELDLYNDALRKALAEGEIEIADIDGAVRRILRQKFSLGLFENRYVDEGTVGLAFGCAEFVELSREVAGKSLILLKNDGPLLPLDRKIGKIALIGPAANSARLVQGAYHYPSFYEFQFGGMPDFEGDTSRTTPPRDMVFALPAAASDLAYDKASNIERPSWDEHLPPTVSIFEGLRSVAPAEVEISYLPGCSIRGDERSGLQQAVDLAREADVAILCLGGRSGLARDCTDGEFNDRVDLKLMGLQEEMLRSVVATGTPVVLVLLNGRPLDLSWAAENVGSIVEAWLPGEQGGQAIAELLYGLVNPSGRLPVSLARSVGQMPLYYNRKPSAGRSQVFGDYTDQQASPLFPFGHGLSYSEFEFSNIEVKSESYAVGDDIQLWVDVRNVSSRDGDAIVQLYVTDPVGSVTRPVLELKAFSRVPVPARECRRVAFTLPAESFAFHGIDGALAVEPGALKLKIGESSEDIHEEVEVQLSGERRILAEYSAPAFTVEIEPVD

SEQ ID NO: 56 - protein, 777 aa, Unknown
  uncultured Anaerotruncus sp.
MKKEIEAIIERMTLEQKATLCTGATHWRTAAFPELGIPSLIVADGTSGLRLQAGSQDKEENDLYENVMFFSFDSPEAIARTLPSTCFPAGSAIACSWDTALIEEVGSAIAKECKAHDVGLLLGPGLNLRRHPLAGRGFEYYAEDPVLSGEMAAGMVRGIQSQGVAACVKHFACNNADYKRTWIDSIVDPRALHEIYLAGFERAIKKGLPRAVMGAYNKVNGVQSCQNPYLLTDVLRDEWGFDGVTMSDWVAVKDPAEACRAGLDLQMPPSASCVRAIVAGVQDGSIPESRVDDCCRHLIELALTYSQEGKEHQPVDFAAHHQLARRAAAECAVLLKNTGVLPLAKDTRSLAVLGALAQYPQFNGTGCAAMNPQCSDIPLQEIKALAPEGCAVTYAPGYTRDYRHDDALLAEAVAAARDAQAAVVFAGAFLPPEDDDFNRRTLDLEPATAELIEEVLAVQPNTVVVVYNAESVAMPWADRAAGILDLWFSGEGSGHAAAQLLWGEISPSGKLPVTMPVRIEDTPAYLNFPGEGDYHYYCEGIYAGYRYYEKKKIEPLYPFGHGLSYSRFTYSAPRVSVPQLVLPGQVTVYCTVQNDGQMPAAEVVQLYVADRHAKLARPEKELKAFTRVYLQPGESREVQLTLETRDFCYYDPACGWVADSGVFELLIGASSADIRLRIDLPVISDRPAPFVMTTDTHYVDLFDDPVATQVFYDYLVEKGLLQREQISAELTEHFKVIFWGMAQHLDGATGDRFTPEMASEVTDRINRALETRQQTAR

SEQ ID NO: 57 - protein, 452 aa, Candidatus firestone
MKKNAKTLKFPKGFLWGAACSSYQSEGAWKADGKSESSWDVFAKKPGIVKGGSDATVAIDHYHRYKSDIKIMAELGLKVFRFSTSWPRIIPNGTGKVNQKGLDFYDRYVDELLKYGIKPFITLYHWDMPNVQELKGGFREKATSYAFAEYTTAVVKRLGDRVKDWTTFNEIKHIWEGCYNSDWQAPGLHLSEKINNQALHNVHLAHGLATNVIRAYSTSCTEVGVVHAMWIRMPRDPKNKKDVWAAEKCFINKNSRLLDPLYKGEYPAHMWSKGSVPEITKEEMKIISTPLDFFGLNVYGGCDVKYNPKEKSGWEEILYDPTVPVTTMNWGVTPNAMYWAVKHIQDNYDIKKMYITENGAAYLDVITHDGKIHDTDRINFLNQYLSELHRAMKAGYKVDGYFLWSLFDNFEWASGYTQRLGCVYVDYPTQKRILKDSAYWYKSVIKGNGIKI

SEQ ID NO: 58 - protein, 801 aa, Unknown
  Tenericutes bacterium
MKKAQGKKSIVDTLSDEQKAPLLYGNQDWHSHGLPKKGLDPIEMHDGPLGLRYVKEENVSDLSAKVASTCFPAPCLLACSFDVDLENRIGQMMALETRAQKTDVLLAPGINIKRNPLCGRNFEYFSEDPLLAGEMGASFINGLQKNGIGASLKHYAVNSQETNRMIVDAIVDERALQEIYLKGFGIAVKKAQPWTVMCAYNLVNGVYCSDSDYLLNTVLRKQFGFKGAVISDWGATNDPILSHNHGLDLEMPCWRDHHQEILDALKDGRLDHQAFDDSTKRMVTLLEKANAPKKPKGFTYGMSHNLAREAITKSAVLLKNEGSILPLENYRSVCVIGAFAKSPRFQGNGSSQVTPVQLTNFVDHINSRRKPGDEVPFAPGYQTNGTSSDSDLSFAAVDLASRSKTVLYFMGLPLENESEGYDRENMELPANQIELLKKIHEVNQNIVVVLSCGSPVELPFLNDIKGLLLVYLTGEAFGEGIDDLLLGKVSPSGKLAETWPLHYYDVPNREFYPGTGRQALYKESIFVGYRFYASADKPVAFPFGYGLSYASFKFNKLVLSRKAVKDAPFTASLLVENLSDKNSELVLELYVHQSRSKTVKPFRELKAFQKVFIKAHGKAKVLFQLDPSIFQHFDIASHQFVTEKGNYRIEIGTSCLDIVSSAAIKVSSDWEAVDQRKVLPDYFFVSGKGFDVPNEEFARLLGHDIPTPKDPKVRPYNLNSTLNDIDQTWIGKLAKKKIVKEMDKYASTPAAKKMFIDGATTSPFRAGQMGHIEPRMINSLLLFANGHFWKGIHAYLSGPKK

SEQ ID NO: 59 - protein, 551 aa, Unknown
  Lentisphaerae bacterium
MYNTLDREQKAWVDRVFAQMDERQKLGQLVCERGYYLREEVKQPAEWLKKYPVGFLFVGSEVIQLQSENVGDVNRVTQYANGTDYAPVVYCGDFERGIGDNIAGYTLLPRLMALSAGFSEKDAYDYGRIIGEEANQLNIRWAFGPVSDLNVNRDNPVTNVRCAGDNPDHAIKILSNIVRGMQEHGCAAAPKHFPGDGSDTRNQHYVTSLNLLPKEEWDRYHGRVFKTLIDQGAMSIMIGHIGFPASEEMDPVRGKFRPATCSKRLMTDLLRDELGFKGIILTDALCMCGYASWADYEQRTLDSFNGGVDIFLWPETERFFDLMVRAFADGRASRERLDDSVKRVLAFKARLGVHRERKVLEAKALEAKLRENRELALNMAYKGATLLRNRKNLIPLKLKKDAKVLVLVTPETPGPMKGAIEFHNELKRRGYDVTYAPFSQFSAVKSVVESFDAVFLICNAQPIYSDYRGFNFALWDFMANRDMDRWIIVSTGSPYYLYDVASAETYVNVYSDSTVSIVAAVEAIFGEKPFLGRSPVGVEHCFSFGDGIITG

SEQ ID NO: 60 - protein, 456 aa, Unknown
  Planctomycetes bacterium
MFEDPLKEPPRTGFPADFLWGTATAAMAVEGALGDAVRGETIWDAFSAAEDEGFTGPDRGCDHLRRLSEDIELMRRLGAGAYRFSVAWARVFPEGRGRADARGVAWYETLIEALARAGIRPFPTLYYWDLPLALTRRGGWAHRDTALYFADFAAFCAERFGHCVSWFTTLNDPWSAALRGYGDGSHAPGIRGHGRRALHHLLLAHGHAAAAVRQLAGEKARVGIAVTVTPVHAARPEAAHAQAAALYDAYLNRCVLDPLLLGSYPLETDAIFPREASPAVDGDAELIAAPLDFIGLNYYTRRLVLAAPGARPLPVKILPPPPAARTPLDDEVYPAGLREALDRLADGYGQKKIFVTENGIPCEDSKADDGTVRDGARVEFLKAHLRVLAAAVKDKLPVEGYFAWSLLDGFQWSRAGPRWGLVHVDFEAALARTPKESFAFLSRVIDAGAVPNPDAW

SEQ ID NO: 61 - protein, 510 aa, Pseudallescheria apiosperma
MAQEASMFSANDLVAANHSSLAGGDLEVKELPLPLDFDWGAATAAYQIEGGASQDGKGKSIWDTYTHLEPSRTNGQNADVACDHYNLMPQDVELMSSLEMGVYRFSISWSRIIPLGGRDDPVNEQGIAFYSNLIDQLLARNIEPVVTLYHWDVPQALYDRYGALLNTDEFRADFERYARLCFSHFGDRVKKWVTFNEPYIIAIFGHLNGTLAPGHCAERGNNTKNEPWRVGHTLILSHASVVQIYASEFRPTQKGSISIVLNGHFYEPFDTSNPADVEAAETRMIFYIGWFGDTIFLGKDYPPEMREYLGARLPQFTEDERELLRRTAPINAFYGMNHYSTKYARALPDPPAEDDWTRNIEEGSVNSKGEEIGPASAMAWLRIAPEGFRKLMNWVWNRYRLPIIITENGCPCPGEDDVERAKDDSFRQRYIGLYLDAISRAIYEDGVKVQGYYVWSLMDNFEWSAGFGPRFGVVHVDYETLVRTPKNSAYYLRDTFKRRRTVVGSQKQAT

SEQ ID NO: 62 - protein, 724 aa, Nonlabens sediminis
MKKILLAIGVITIMLSCQSSTDNPKNIDGKDAEIAEKVERLIGEMTLEEKIAEMTQDAPANERLGIPYMKYAEALHGMWLVLDYYGNTTVYPQAIAAGSTWDPELVRKMASQTAVEARTLGVTHCYSPNLDVISGDPRYGRVEESYGEDPYLVSRMGVAFIEGLQGTGDEQFDENHVMATAKHFIGYPENRRGINGGFSDMSERRLREVYLPPFEAAIKEAQVASVMPGHQDYNGVPNHMNTWLLKDILRAELGFDGFIVSDNNDIARLGTMHFIAENRTKSAILGLKAGVDMDLVIGKNEKLAAYNSNVLKDTVTQNPELEKYIDKAASRILTAKYKLGLFDTEPKEIDTETVYASTEEHQEFSYEMAKKAMILLKNENNLLPLDINNIKSLAVIGPNAHEEQPKKGTYSLLGGYSGLPPYYTSVLEGLSSKTEGKVKINYAKGCDLLSNSKEGFKDAVAAANKSDAVVLVVGGSRKTGGEGADRANLDLYGVQNELVETIHKTGKPVIVVLINGRPLTINYIAENIPSVLETWYLGMRSGDAIADAIFGDTNPGGKLTVSFPRDVGQLPVTYLERPDFIGSGKGLYKNADKTPLFPFGYGLSYTTFAYGKPYLENNTIKTDGSTTVSVDITNTGKREGDEVVQMYVRDDFASVGRYLKMLKGFERITLKPGETKTVNFDLGFEELNILNQEMKKVVEPGTFTISVGASSHEKDLQKITLKVQ

SEQ ID NO: 63 - protein, 729 aa, Gynuella sunshinyii
MFDPVTILKQLNREEKVQLLCGLDAWHLHGVERLGIPSITLTDGPHGVRLAQSHDVFDSVDATVFPVEAAMAATWNVGLIKELAGAIAKECQQLGVSVLLGPGVNGKRSPLGGRNFEYFSEDPYLTGAMASNFVEGVQSQGVGACLKHFAGNEQETRRFLINSVIDERTLQEMYIAPFAKAIRESRPWTVMGAYNSVNGQFACQNSHLLQDILRDQLGFDGLVMSDWGAVGDKVACHQHGLDLEMPGPADRDQQLLDALDNGDMSEVVLDSRVLKVLELIHKSVTHKRDVQVDFERHHELAIEVACDSAVLLKNSGNLPLDKSRSIGLIGQFAKHPRFQGGGSSHMNPRHLSNAFEAFCSRAEVSWAMGYEELEMTDEMLREAVALAKRVDQVVLLTGTTDALESEGFDRSNMRLPEAHVELIKAVYQTNSNVVVVMYAGSALETRQIEDYAPSLMHAWLPGEGGGEALARLLFGEVSPSGKLSETFPVRLEHNPTYESFPGNKADTIYNEGIFTGYRYYDTKKLPVQYPFGYGLSYTSFAYSDLSYDASCREVAVNVTNIGDMAGAEVVQVYIHDEHSTLRRPDQELKGFAKVMLQPGETQRVSIALDEQAFAYFVTHLQRFAEESGRFEIRVGSSSRDIHESLWIELESDIECRQIPTLNDTVEDWLRDDRTRPILEDAFAQVGFTKDHSFYALTLGFPMTLLKKFMPMMGLTEQQCESLKDKLGLE

SEQ ID NO: 64 - protein, 661 aa, Verticillium longisporum
MGVGACPKHFVCNDSETLRHFYDVRHSADSRTLREVYLAAWQHLLRTSDLVGIMMAENRPLMEGVLRAQWGYKGITMSDWFAVHNTAVPIQAGLDLEMPFPIFRGARLVKAVEAGEVAIGEVDARVLKMLEACHGISTEKSIVNEKTNRLAWELAASGIVLLKNEQQALPIDLTQSSADRVAVIGEFARDPVITGGGSASSTPQYRSSPIDLWKEAADNAERVRCSPGVRTRRIKPVADTDKLVAKDGRPGADVTYYNDDSPEPLLEEHQAKPVVWMLGQFKPGLKVPGSRLKITTNLTPSTSGDHTLAIRCTGAFTLSVNGETVLTGSDKGIPTEQFIFNHILLETGTQVSMEAGVSYDIRLDMAGPPELVIGEPTPYAASLCFEEAYDEQQAMANAVALARTSDVSVLYAGRDEQYESEGFDLDDIRMPANQAALIKAVAATSKKTVLVLHCGNSIDVSAFVDDVDAVVLAHFPGKEGARAVVDVLAGAVCPSGRLATTWFKTLEDAPSFGHFPARKLEDGSVRIEYAEGVEVGYRSSQAAAGDRVRWPFGFGLSYTSFHVTVKNTGRVAGQEVVQLYASPAKETAVSRPGKELKAFDKSMLQPGESRTAELAVDLKVACSYWDENEVAWRMEPGTYGVLVGGHAVPFSVSKGSSWNHL

SEQ ID NO: 65 - protein, 463 aa, Unknown
  Cellulomonas sp.
MTRPFPRLPAGFRFGSATAAYQVEGAWDVDGKGPSIWDEFTHRGGTVRHGHTGDVANDFYHRYAEDVATVAAGGVHDHRFSISWPRVVPAGTGEVNAAGLDFYDRVVDALLTAGVQPVPTLYHWDLPLALQEQGGWFARATADAFAEYVAHVVDRLGDRVGTWLTMNETSVHTLYGHGLTDHAPGLGLGVDAMLAGHHQLLAHARAVEVLRAAGPSRVGIVNQHYPVHAASDDPADVEAAAAFAALTVWAFSDPVLAGRYPEGVAEPLADAVAAHGGDLAADLVRIAAPLDVYGVNYYEPTMIEAPRAGKDYRGVLEVDVPEGLPFSPVPYPSAERTDFGWSIAPEGLTRALVELRDRYPTLPPVVVTENGASFHDGPPDAEGRVRDPRRIAFLAAHLHAVEDAVTAGVDVRGYYVWSAVDNFEWAAGYDESFGLVHVDRDTLVRTPKDSWAWLRDVVAAQDA

SEQ ID NO: 66 - protein, 573 aa, Hungatella hathewayi
MVDLRGNPFYLDEAGERWVKETEAAMTPHEKVCQLFADPLMGKSREELIQFLEEYPLAAIPFRAVLYGNEEAQDIMAELQERAKIPYLYAGNCESGPNGALKGGTLVASGAQVRATRDARYAYEVGRITGSETSAVGYNWTFGPVGDIYGNWRNSLINTRAYGSDSQFVSDCVEAYNKGCMEYGVVPCLKHFPGDGWEERDQHLAISNNGLTCEEWDKTYGKIYQTAINHGVLSIMAAHFTLPAYQKKLNPQLEERDMQPACLSRELIGGLLRGRLGFHGLVVTDQTKMMGYYGMSRLDAIPLSIACGCDMILGINDIEEDVEAMKAGLKSGIVTEERLTEAIYRILACKAAIGLHRRKESGSFHPGKEALARIGCREHLEIAREASQKAVTLVKNTKGQLPLSPEVYKKIGVFVLSGNVGSLNSSYGQGVQSGGSDQITERILAALKKYGYEPELMVSSVNKGKIADFKAKYDAVMIFADITSFAQTNSVRLLWPHPMSSCYPWYIHDVPTVFTSFNYTNHLVDVARVPAFINAYNDTPETVDETVKRIAGLAPFEGNYDEDVWCGMWDTHF

SEQ ID NO: 67 - protein, 461 aa, Unknown
  Mesorhizobium sp.
MAETPAALGATFPRDFLFGVATAAYQVEGALAEDGRGESVWDRFLREPGRVVDGSDGSVSANHYHRWREDLGIMTELGLSAYRFSVCWSRVQPTGSGAVNEAGLGFYDRLVDGLLERGIEPIATLFHSDMPAALMENGGWCARETSTRFADFAEHVARRLGDRVRSWFTIAEPYTLMRHSYVLGEHAPGFRLSTGAALPVMHHLLLGHGLATRAIRAHSNARIGLTNHSSPCRPASNAPEDRAATVLFDALRNNLVTDAVLLGRYPKELEALPDANWSAVREGDLDIIKAPIDWLGLTYFHPLTVTALKPAATPALEPFEVEVTGGAAETTMGWPIVPSGLGEVLTALRDRYGDKLPPVVITENGCSMPDQLSEDGRVDDPGRIRFLSGHLQVLTEAMRSGIRVDGYFVWSFLDHFEWELGYTKRWGIVYVDFATQQRTLKSSARWYRELIESWRSATGQV

SEQ ID NO: 68 - protein, 773 aa, Unknown
  Clostridium sp.
MNIEDIIKKMTLHEKVMFCTGKNSWRTLDLPHLGVPSVLMSDGTSGVRFQMGSDDPKPSTFYDTLSGRFDDEKALNNTCEATAFPSGSAIACSWNKDLIRQVGRAIAAECRGIGIQLLLGPGINIRRHPLTARNFEYYSEDPCLAGDMAAAMVEGVQSLGVGTCMKHFACHNSDTRRTRVNVKAEERALREIYLAPYERVVKKADPTSVMSAYNKINGQECSGDNRYVRDILKKEWGFDGCVICDWGAVKDSVEASKGGIDLQMPLSPASSKYLEEAVQDGRLDEALLDERVRNILKLVQRLSESAPADSDTEPDFDRHHKLAREAASESMVLLKNDRILPIRPGFAKKLAVAGLLAEQPLYQGTGCAIVRAKEVDIPLTAIKRYADEMDMEVTYVPGYGADGTIDPDQLKKAELAAREADLVLVFAGSFLPEEDDDYNRKNMAIQEGHEALIHAVSGANENTVVILSNGDVCEMPWEAEVKGLLDVWYSGEGMGQAVADILFGESNPSGRLSATIPFRLSDTPAYLEFPGNTFDLTYNEGIYVGYRYYDKKDVTPRYPFGYGLSYTNFHYSGLKAGDDYRVPGTYRVSVDITNRGAYGGKEVAQLYISQAAPGLPRPVRELKAFEKVYLEPGETKTVTFDLTERDFAYYDPESAGWVVDSDTFMIEIGASSRDIRESHKLQVYNEKKPVRRLRKNCGFAELLSTEQGREIFYNFLIERKLLTRDQINPETEKSFLWAFWPVRCFLDMGAGEMITYEMIDELIDRINQALGNG

SEQ ID NO: 69 - protein, 431 aa, Unknown
  Chlamydiales bacterium
MVNDPKNFLWGVATSAYQIEGAYDLGGRTPSIWDTFSHTPGKTYENQTGDRACDHYQLWEQDVELMKSLGINAYRFSISWSRVFPENSKEFNPNGLDFYQQLIDKLLKVNIQPFVTLYHWDLPQYLQDKGGWAIRETAERFRDYAYFLVEKLGDRVSYWTTINEPSVVAYAGHYHGVHAPGIQSTDQTLKALHHLLLAHGLAIHAIRSRFEVKLGITLNLSPVYPDHPSSVLDQKASYLYDTYVYRSILDALYLKKYPEEMDMQEVVKLGDMEIIGATTDYLGVNYYTKTMVCFDENQGLMQARVVPPIRNAYSDLWDFYPQGLSEVLERVCSNYQPPRIYILENGTSLEVEEDDQGRIAYIRAHLSEMRRCLEKGINVQGYFYWSFMDNFEWAYGYSKRFGLFHVDFKTFERIPRASARWYAHEIAQNKD

SEQ ID NO: 70 - protein, 425 aa, Unknown
  Spirochaetes bacterium
MKKERTEKINFLFPAGFRWGSASSAFQVEGGCPHHDFYDWALKGRIKDGTSPIDAVRFWEYYKGDIALMKRMGHNAARIGIEWARIEPSESEFDEKALAHYRSILREMQRSGISPMLTLHHFANPMWLVRRGGWENPETADRYLRFVQKAAKALGDLVDIWITINEPSVYAVSAYLFGEFPPGKKSFRRCLKVMDVMIDAHVRAYSAIHEIHAGKNWARARVGIAKHLRTFDPLRNGNPLDRLSARLMDKYFNNRYLERISAKGRTLDLFGINYYSGDLVKFPMNLLTRPELSKNKLGWDIYPEGLYRVLRRYWDLYRLPIYITENGTCEDGDEIRPRYILDHLYQLHRAFKEGVEVAGYYHWSTLDNFELVDGLMSRFGLVHVDHGHPKRKRTLKRSGLMYGEIARAGGITGRIVSKYAPDWRP

SEQ ID NO: 71 - protein, 458 aa, Unknown
  bacterium
MKKEIIFPKGFLWGTASAGHQVEGGNEKSDWWKFESEGKVYDGTVSGKAVDYWNRYEEDHEMMAKLGYQAFRLGIEWARVEPEDGVFDMKAVRHYEKILRSLRKHNIKICLTLYHWVLPLWFAEKGGWEHPEAADRFMAFCELIIKELGEYPDLWVTLNEPNVPAAAGCLAGVFPPEKKSFASFCKVSNTLLKSHARCYRLIHDLVPKGPDGWPSKVGVANAYQHVAPFGTPGLAGAYEKALSPVLAYGSFKAWDYSVATGWIVPPFGLEHVPGLKDSYDYCGVNYYTRMSLKFDAAKTDDMLIDIHGIQPGIEMNQMGWENYPPGFFHTLKFVWNTFKKPIYITENGCADPQRDDIDRRRYLLEHMAQIARALDAGIDVRGYFQWSFTDNFEWREGFIKKLGLIECDYADPELKRIPRVSAAMYADIVKKNGITTKLLEKYAPDCADGVFGDKWMDQ

SEQ ID NO: 72 - protein, 442 aa, Unknown
  Thermotogae bacterium
MPKGFPKEFFWGTATAAYQVEGADAEDGKGPSIWTSFSRQPGRIADGHTGDIACDHYHRFEEDLALMKELGVNAYRFSISWPRVLPEGRGPVNTPGMDFYQRWVDRLLENQITPFVTLYHGDLPLALQERIGGWAGEDIDRYFGDYAALMFRTLGDRVTYWITLNEPMRFSFIAYGKGEYTPGEQNLKTAFLVAHHLLRAHAQATARLRELLPNGKVGLINAASWIEAASESGEDIQTAFIANQLLHDWFFLPVLTGKYPEEAAQFVRGLGLLPVFDPQEMSRIAKAPDFWGINYYTRRRVKMDMSRPIFFAYAPPERETTESGLEIYPQGLTAFLKIAQKEYGSIPIFVTANGMADKDVLSNGVVADERRIAYLKSHIEAVQRAIAEGVDVRGYFVWSLLDGFEWTQGYDKRYGLIYVDYEKSLTRIKKDSYYYYKNYLAL

SEQ ID NO: 73 - protein, 842 aa, Pseudallescheria apiosperma
MSQKHTVGGAELVINGAENEVVQHEATAAANPNALSSKEIADRRAEYDTYVETWKLENPRLAASLSSDTVEAYWEQLLSHVSPIYSRTSGQPVASKLDYVQKRRSTSESEISNARQLVQIAMEETRQKSLEISKNPGRNHYSLKGSNGGKKGSKRDLVRPMITEEVRKAAALIAELEAQDLDREGRLYKEYNITIKDQATGRKEQKIQSYRSRSRRAGEYWLAQLGSQHPGRSPFQNDPGYKVFRNVRDYGARGDGKTDDTEAINRAISDGNRCGDNCGSSTVKPATVYFPPGTYLVTASLQNIHFKMKRDSSQVGLFMENGPAFLVDTQPVNSEEQVTVVLLNTAYTNTRTLVDSKSSGAYLNGGSNGYVESYFVGKTYSEGSSKNGFSNGETGDATGIHYSIPQELRFAFEKTAGVYSRSRPQYLDENNWMVVEAAGDGSTDDSAALSLAFSLSAQQKRPLFVPHGVYIVTQTIAIPAGAVIVGECWPQIMASGPSFHDIDDPTIMITVGNPGDEGGVEISDLLFTARGPTAGLVAMQWNIKADAAGRAAMWDSHFRIGGASGTDLRPPIAQNSLVKFGLNVLQGHYYFTSVVTRTSALDNQRMRRVVSICLQAGMSLLGLKGGGYYILKNTLSEEPCNDREAHSTARWLDGQCYALHSSGPGNTGYTVESSTIFSREGNDIIAGLFNGTIDQNPEPTAYKDELELLYGSSQRCQDLMGDYSSQRYGDVEEEEGHDPAEYAAGGLDLQQNCFFNLPVLSVDAWTEDDPVGSTPCVFLRRGLGDKVGENKLPDWMAEVFTPDFCSTKCRGQKCRDDLEPCNRRNGDPLCLAGNKTQDRTSK

SEQ ID NO: 74 - protein, 741 aa, Algibacter lectus
MNQNQFNLIALNLNEKQRLIFIILFILTLQSYAQNNYKWFDESIPFEERANLLVQAMTLEEKCSQFVSASPAIPRLDVPEYNWWNESLHGVARNGKATIFPQGIAMGATFNPELIKEVSTAISDEGRAKFQVSKSINNRGQYAGLTYWSPNVNIFRDPRWGRGQETYGEDPFLTSKIGIAYVEGLQGDHPKYLKTTACAKHYAVHSGPEELRHSFNANPSKLDLNETYLPAFEALVTQANVQGVMGAYNAVYGEPSTSSTFLLDDILKKQWGFNGYIVSDCGALGDILKGHKKAKTVEEAAALALIAGVNLNCGWVYNEIQSAVEKGLISESLLDERLKQLFLIRFKLGFFDKDESNPYNSIGTEVINSKENKELARKVAQQSIVLLKNDNNVLPLDKKIKSLYVTGPFSSSSNILIANYYGMSSNLVTVLEGVTEKVSLGTSLNYRQGVLPFQKNLNPLNWAPNVAKTIDATILVVGISNEIEGEEVDAIASEHKGDRKDLKLPQSQIDYIKEISEVKKGPLVLVIGTGSPVSLEDVEPYVDAIVLMWYPGEQGGNAVADILFGDVSPSGHLPITFPKNVDQLPAFDDYSMKGRTYKYMEKEPMYPFGFGLTYGQTEFSNASGYLKSISKKQDFSFSVDIKNTSKVNFEDVIQVYLVPEDTQGFLPKYSLKAFKRVELLAGETKNISFNISNQDFYQTNLEGEKAWIKGNYKLMIGNALPSKKSLKLGAAKPIEITIKLK

SEQ ID NO: 75 - protein, 525 aa, Paxillus involutus
MHVTLQSVLNSLHLGPPQTAQSRLAPNLEGVGEDVTVVYRYRKQRGVNLGSWFVLERWITDAPFRYAVAPGQSDLDVAKGSHAKEILERHWDSWITGNDFKWLASRGINAVRIPIGYYHLCGIDSSLLQKTDFQGLEEVFQGAWPRLVRAVETAQLHGIGVLFDLHSAPGKQNQDSHSGTSSPRVSFFDDRFNLQLTIRALCTLVSAIILLRSEHDPPIKNVIGVELLNEPRPPSHPALKDWYVKAIQEVRSLDPVLPIYISDCWMSDDYAGFVKSLPKSTAPICLDHHLYRCFTSSDNSTPVAQHSASLTDPNGSTPQTFARVAGMLEDAGGALVVGEWSGALNPGSLQGPINEREERKRYVAAQLALFERYCAGWFFWTYKKQQAGDQGWSFRDAVEAGVFPNFVGMRPTKNVPIDDAGRKGAALTRAIGQHVSYWAQYPGQYEHWRFEKGYNQGWGDAYKFLLNKDTTLDAVSELGFKGPWKKKRVYEHGTESGFSNNVWEYEHGYDQAVRDANLDFQNTYC

SEQ ID NO: 76 - protein, 762 aa, Verticillium longisporum
MHIVSRRVLRVSRVVPSLVRRKTGSSGLTGTEPKSVKHLRLAFVNMAPSPLNLLLLGAVLSQSTASVISPRQRVPDGFVAKSVYPTPHGGWDRDWVDSYERAKAIVDQMTLAEKTNITSGSGWWMDQDVVSATLAAPLALGSLNSAWDVAAAYGNVIVVVQTVGPILVEEWIDLPSVKSVLFQHLPGQEAGESLTNILFGNVSPSGHLPYSITRREEDLPESGVNVWLGPSVGPLGRKPKGGRNWEGFGSDPVLQAKAGALSIKGVQEQGVIATIKHLIGNEQEMYRMYNPLQQGLSANIDDRTLHEIYLWPFAEGIRAGSGAVMTAYNAVNGSASVHNSQMINGVLKNELGFQGFVMSDWFSQMSGVDAAIAGLDMAMPGDTQVPLFGYSYWMYDLTRSVLNGSVPMDRLNDMTTRIVATWIKFGQDKGFPKVNFHLLSNDAVGDLYQAAWPFSPRGVINEFVQVQADHNLVAREVAQDAITLLKNNGSLLPIATSRSIKLTGGSTGQPQDTFSEGLYIDYRYLNKNGIKPRFPFGHGLSYTSFNFTNPSISAVTQLSRTPPAPPSRAPVLNFNQAIHPWQQGVVPAGFSRIFRYLYSWCTEGEAKQAVRDREDGKKYPYPPGYTTVQPSAVPASGASGGNPRLFDVAFRVSVTVRNTGATHTGRASVQAYVQFPDGGPETPIVQLRDFEKTSRLAPGGSQVVTLALTRKDLSIWDVVSQNWIVPSPGGRYKIWIGDASDRLFTACYTDTGRCESGLQSPV

SEQ ID NO: 77 - protein, 708 aa, Mucilaginibacter gotjawali
MFCILLLSALNYTHAQSKTDKLTDDKISSIIKKLTLEEKISLLHANGIFSAGGIKRLGIPHIMTDDGPLGVREDVLEGWGPANLTTDSATFFPNGSALAATWNPDLAYRYGHDMGEEARVRGKNVMLAPAFNICRTPLCGRTYEYYSEDPFLNSRLAVQSVQGIQSQHVAACVKHYAVNNQEIERGRVSVDIDERALREIYLPAFKASIIEGKAWTIMSAYNKLRGVYCSENDYLLKKILKGEWGFKGIVISDWGGTHSTVAAANNGLDLEMGSNPPYNTYYFADKLLDSVKAGKVSVKVIDEKVHRMLWVLYHTDMSANLPKGSINTPAHSKTAYDIAAESIVLLKNDKHLLPLNTSAIKSLAVIGDNATHTFHLGGFGAGVKAKYEITALAGLKNRLGNSIDIKFAQGYSGAYKFGSHTEFKPDAALIQQAVATAKSTDMAILFVGGNRDYESESQDRKDLSLPFAEQALVDAVTAANPNTIVVVVGGAPYDIGKIKENNHTIVWSWYNGSENGNALADVLTGKINPSGKLPFTFPASLKDSPAHALNAYPGENLKVDYKEGILVGYRWFDTKKIEPLYCFGYGLSYTGFKYSGFYTNKKSYKTTDHITVSLKVKNTGKYAGKETVQLYVSKTGSVVERADKELKAFKKISVAVGETAAVTLSIPVKDLAYYDVKTSKWVVEPGKYKLLAGTSSRDIEQSATITVD

SEQ ID NO: 78 - protein, 751 aa, Bacteroides uniformis
MKHSTLSLLICIGGCFSACSPTNEKVNPLTQHEDEITNIIAEMTLEEKINMLHGKNMFSSAGVERLNIPDIEYADGPFGIREEMEPHSWNSLHLSTDSATFFPTGSALAATWSTEMAYKYGEGMAAEAKLRGKDMILGPAINIQRIPTGGRTYEYLSEDPLLSGELAVNYTLGAQDHQEAVCLKHYALNNQENMRGFVDVKVSERAMREIYLAPFEAAVKKANAYGVMAAYNKVSGEWCSENDRLLNKILRGEWGFKGIVISDWGGTHSTIKAALGGLDVEMPNDRYFGKALLDSVQAGVVSEKVIDEKVRNLLRVRLAIPAVPKEEANTQMTSLPAQQQIAYEVASRSIVLLKNSGLLPINTEKVKDIAVIGDNAVRHMATGGVGAGVKALYEITPLEGLQKAYEGTNVKIKYAQGYLPQERSSRHKRNSSETASSEKEIREKSERLVQEAIALAKEADLVIFVGGNNREVETEGSDRKNITLPSHQDELIQSIAKANPNIVSVMVIGGPVDLQTIEKNSSSILVSWFNGSEGGHALADVLSGKISPSGKLPFTFPIKLEDSPAYHLGVYPQQQPERPRDVFVDLVNRDKFRAEQKAEADYAEDIFVGYRWYATKNISPLYPFGHGLSYANFQYSALQAKINKSQVDVSFTLDNIGKMNAEEVAQVYITRPQSAIERPAHELKGFQRVALKAGESKEITISIPLEQLCHWDEKKHGWTFEEGPAIIRVGSSSENLPLNTEINLINVYKPQ

SEQ ID NO: 79 - protein, 850 aa, Unknown
  Coprococcus sp.
MTDKIKTILEQMTIEEKADMVCGASNFCTADASRYGVPAIRMLDGGTGINYEQLIADLILSWRTNPRDEEEAWLMKDFSATEERNVIFDYFRPDKLTEKETKVWKKVREYLKEQFIKNTTNNDTTLAFVEMAGDAAADIMSPACLPCGMMLGATFNPDVVNQTGHALGREARAYGVSMLLGTPNINIHRDPLGGRLFEGFSEDPCLVAKLAPEYVKGVQAEGVAANIKHFAANNQEKNRQGINETISERALQEIYFPGFRACVEQAQPATVMAAYNKINGTACTANEWLLDGILRKYWGFEGMVVSDWGAVYDPIAALKAGNDLNMPGITADPEKVVQAVEAGELTEEELDRNVARVLELMDTYGSPECYDMSAQYIMDMSKQAAYKAACEGIVLLKNENGIFPIRSKGKAGNDSVFETVSDEEVMSGVVLCGSGAIRLYDCGTGSAGITTDKDSSIYEGLIQNGVEVSIGIPAAGKRAGISTYICVARIPGMEGNDRKNMKLSAEDAQILNQMLDLKRENPLVKLGLILNVSGPVNLALWEHELDGIFCMFLPGMEGGHAMADILIGRVNPSGKLPLTFPKKYQDTPTYLNFPGDGYQVNYGEGIYVGYRYYDKKMVEPLYPFGHGLSYSHFEISNERAIGEQSPVEIIYPDGKVDNKKMPVFTDSIKIAVDVINQGPEEFSEGMEVVQLYISDPYASISKPVKELKAFKKIRLAYGEQEKVSFTLKKDDFASFDSDLHQWVAEEGIYNILIGNSSRNIVCSMPVYLDAKTEYSYSIETPIKVLYENSVTKAHMNHLWLRLGLDPADIDNKYEYEPHTRLIDLVHLKCENPEQEALDEFGLRVGSLKRA

SEQ ID NO: 80 - protein, 585 aa, Unknown
  Blautia sp.
MTEIDMKGNPFFLDEEGENWVLDTWKNMSLEQKCGQVFCPMGFNGEEETLKHFTQDIQVGGLMYRADSAENIQDIYRKLQAFSNIPLLLAANTEAGGDGLAYEGTSFGKPMAVAATDDPENGYRMGYTACKEGAALGLNWSFAPIVDINYDFHNPITNVRTFGSDPKKVLDFALEYMKGADECGVAVAIKHFPGDGVDERDQHILTSVNSFSTEKWDETYGYVYGNLIKKGAKTVMVGHIAQPAYVKALNPQATREEMLRPASLSKELLTGLLRGKLGFNGLISTDATPMVGFTAAMKRSEAIVQAINAGCDMILFNKSLEEDFGYLLAGAKTRNLSMDRLDEAVLRILATKASLGLHKKKAEGTLVPEKEALEIVGCEKHKSWAKKVADQAITLVRDEQELLPISPKKYKRVYLNVIQKDLDPENAFVQSWKEKFEQEGFQVTVRDRRVSISMEDFVNPAGMTPEKGKLMHEMYRSVEEMKQDYDLYVYICNMENASNNTTLRLNWNVCFGLGDDAPWFAPEIPALMISTAYPFHLFDAPMVKTYINTYSGNPEFIQAAMDKIMGRSEFTGVSPADPLCGKNYI

SEQ ID NO: 81 - protein, 462 aa, Unknown
  Cellulomonas sp.
MSTTFPDGFLWGAATSAYQTEGSLTADGRGRSVWDDFTARPGAVEGGGDGSIACDSYRRWADDVQLVADLHLGAYRFSVGWSRVLPTGRGPVEQRGLDHYERLVDAILERGATPVVTLNHWDMPSELMRDGGWAGRCTVDAFGEYASAVADRLADRVTWWISQNEPWIVSLLGYQLGLHAPGVADLDAAFRAAHHVLLGHGRAADVLHAASGRAQVGAALSLFPCDPATDAPEDRAAAWGSDGYVNRWYLDALLGQGYPADMRAHWERALGHGVDDVVREGDEPAIAGRSDFVGVNYYTRRVVAAAPVGPDRAFPWRVVTATDDNPRSDEGWEIVPDALRDLLVRIEREYGVPSMVTENGGVFGDGPTHDGRVHDVRRTELLLGHLRAVHHAIGAGARVLGYLHWSLLDNFEWALGYRPRFGLVHVDYPTGRRTVKDSGLLYAEIARTGTLPDRLPAITPFG

SEQ ID NO: 82 - protein, 641 aa, Unknown
  bacterium
MWVVMSSYNSINGVTASENDLLETPLNSEWGFDGVVISDWTAVRSVAAASASQDLAMPGPDGAWGAALVEAVRDGRVSEAAIDRKVARLLTLAQRVGALESYAGGPADAGGLLRVEDGVAFAREAAAEGTVLLANDGVLPLDVARLRRVAVIGQNAVGARTQGGGSATVIPERVVSPWEGIVAALPDAEVTYRLGAVAAMGITALPLAELTNPSTGGPGLLVRFLDDAGVELMREDRFATSLVFFAGNAPTLTASVLELSCQWTPTENGDVTVGFASIGRGRISVDGALVLDDVAVGDSTDVGANILDPPKAVAPVAVSVTAGRPVDVVLELDLAIMQETTDGAFGITLGVAPSDTDPEARIADAVAVAAASDVAIVVVGTNAQVESEGFDRSDLRLPGRQDDLVAAVAATGTPTVVVVNSGSPVELPWRDDVSAIVLPYFGGQEMGNALADVLLGRVEPGGRLPTTWAASMAEVPVLDVTPVDGKLEYAEGIHLGYRAWLRAGLGDEPREVPRAAYPFGFGLGYTTWELRDLVVEEVAASGGDVRVGVTVTNTGARRGKQVVQVYLARPESSVDRPVRWLAGHAVVRADAGESVAVEISVPARAFAHWQNGVGWAHEPGTFDVLVGTSVDDVPLSSTVTL

SEQ ID NO: 83 - protein, 594 aa, Unknown
  Spirochaetes bacterium
MQDPSRPVLATLKHFVGHSFSEGARNHAPVRIGPNELQDTFLLPFEMAVKLAKAHSLMPAYHDLDGEPMHQSVRYLQEILRDQWGFDGIIVSDYEGISQLFWEHRTQPDMASAAAAALTAGVDVELPGDTAYREGLKQALDRGILDMAVVDQSVYRHLLWKSRLGLFENPYVDEDSILPDLGKHDELAYKAAVRSIVLLKNDGILPLADAGKVALVGPLADNAYGMLGGYSFPVHLVLSERKERDTALRTLRNELSDRFGENLVYRKGCDILSGRPEKPAVFPGDVAQDGSSQTSYISTDESGFAEALDAARNADTVIMAVGDLAGLFLSGTVGEGSDASSLELPGAQRRLAEAVLDLGKPTIVIMFSGRPYNSGTIFERANAVIQAWLPGQRGAGALADIMTGTVNPEGRLSVSIPHVAGAMPYFYNHKRKSPGTPIQQEFGAAYPFGFGLSYTTFSMDSFAVEEKSIPIDGDIRVSLTVANTGKREGDELVQVYIRDNYSQLVRPVMELKAFQRVTLKSGQKAKLSFRIPSDMLQYTGRDGKRMVEGGTFDIMIGNSSRNILFKETVMVEGNVRYLESDWKMLSTCAVSYLN

SEQ ID NO: 84 - protein, 801 aa, Unknown
  Tenericutes bacterium
MVNEELKTLLHTLSLTTKLKLLTGANFWESEKVLGTDLPIIVMNDGPFGVRKPTVNVDSGMLMEVIPATAFPTTSALASSFDPELLEKMGKTLATECIDQGVDLLLGPGINIKRSPLCGRNFEYFSEDPYLTSEMASGLVRGLQSKGVGATLKHYAVNNQEKERYTTNAIVDKRALNEIYLRPFHNVIKNTEPFSVMCSYNQINGRHASRHYKLLTEKLRNEANFKGLVVSDWGAVVDHVDSINAGLNLEMPGGYQNTAELEKAVKDGEIKLETIDEMITPLLKFMMYKRDNPKPKVKCDYKKNLEVAQEIAEKSAVLLRNEDNLLPINKTAKVGLIGNFAIKPRYQGSGSSQINPHTLVSVHDAFIQNDVNFVYADGYAEHEVKPNKKKIAEAVKVAKNSDVVVLCVGLPESYEVEGYDRKTLDMPPSHNELIKEVAKVNENIVIVLSTGSPVTMPWINDVKSILLTHLAGSMTGPATYNLLFGVTNPSGKLSETYPLSLDKGLPGGEFLTSDQNVLYRESLYVGYRYYDTFREQVLFPFGHGLSYTQFNTSHHEIEEVKDGYNITMEVTNIGHIRGAEVIGIYTGKSRSLLYGPRKELRAFKKVYLDPGEKQKINIFLPTESLKAYCPVKQEWVLENVNYNVYVGINVQTTDEIFQILVDDANDLSYLKNYQKENEMYYRRADFNPSIKDFTTLFGGESLPLFFANRKRPFTLANNISDTTDYWWGRTIYKIMAKTSRKLAGDDVVLQEMAVETIKELPFRSLSALSSGEVSTNQRDAILLLVNGKPIRGIFKFLRKKK

SEQ ID NO: 85 - protein, 739 aa, Flavobacterium gilvum
MLIKKSILFQITKKIKMKKVIITVFSLLLVGYLHGQKKVSNPSYEKAVNELLAKMTLAEKVHILHGDHLYSFPGVERLGIPPFFPSDGPCSVRPELSDGGDYVNTNNKKDCATAFPTLSALAATWDVNMCYLFGNALSSENRARGKDMVLGPGVNIMRTPLNGRTFEYMGEDPFLTSKLCVPVIKGIQSNDIGACVKHFAMNNQELNRQSVNAKVDERTMREIYLPSFEAAVKQGDSWSIMGAYNKVNGDWSCENPFLLQTILRDEWGFKGLVVSDWGAIHDMKRAALAGCDIETDRGPYYKNLEKAVINKELSEEVVDVKVRRLLTYFFKTKKLGPDAGNRKSGSINTEEHKMVAKKIAAESIVLLKNSENILPLDKNSLKKILVIGRNADLKLCVGIQTSGYCNLDLAGGSGEAKPLYEITALDGLKNVLGTNTEIKYINSKEYSFEKALSSASKNFYNPGFVKMVQSMDAVLIFTGNSHAEEQEGADRLTLNLPAGQDEMVNALAGINPKTIVINQSGAPVAMPWIEKTNTVVQYWFSGQEGGNALAEVLFGTVNPSGKLPCTFPQKLEDVACHANKSYVDNEENYSEGVLVGYRWFDTKNIQPLFPFGHGLSYTQFEYGKLEMKKEMKSNEVFVVKIPVTNVGKREGAEVVQLYIHEKNPVLLRPEQELKGFSKVTLKPGETKMVEIQLSARDFSYWSVEQKGWKASEGNFELRVGSSSRDIRAKGEVRFISSKK

SEQ ID NO: 86 - protein, 842 aa, Algibacter lectus
MPVLGFSQTKYTFQNQDLPIETRVQDLLERLTVEEKVSMLVSTAEAIPRLEVEKYYHGNEALHGVVKGGRFTVFPQAVALAATWNPDLIYKVSSAISDEARAKWNFYNQGKDQKNVYSDLLTFWSPTINMARDPRWGGRTPETYGEDPYLTSKIGVAFVKGLQGNDENYLKVVSTPKHFVANNQEDNRFAYNANISDRSLREYYFPAYKATVQEGNAQSIMSAYNAINGVPSTANSWLLNTVLRDEWGGFKGYVVSDCGAPTYIVKSHKYVDTKELGAKAALEAGLDLECGNDIYAKYLLSAYKKGLVSEEHIDKATARVLTARFKLGIFDSTENNPYTKISPDVIGSKKHQDLALEASRESMVLLKNENNILPLDVNAIKKIAVVGFNANQVVFGDYSGLPVIKPISPLEGIMEKVGNKAEVTYVKWKTAARNLNLIEAENLRNDHNDETGLFGEYYDDKFLEGTPQTRVDKVVNFDPVNNPPDPYTNYRHKSIRWTGYITPNFSGTYKIGVNSDDGVRLWLNNKLVVDEWHNRGMTTDQVEIPMEAGEKYVIKLEYFDNGGDAICQLLWEVPTLTDDLYAEDKAVARASDYVIAVMGINKSIEKEGRDRTDLKLPEDQVNYLKEIYAENKNIIVVLVAGSSLAINWMDNNIPAIVDAWYPGESGGKAIADVLFGDYNPAGRLPFTFYKSITDLPPMDDYEVSNGRTYMYFEGEALYPFGYGLSYSEFEYKGMKIKQKGDMLTITTTIENIGNYDGDEVAQLYFKAPNASIKRPLKKLVGFKREFLPKGKSTQIEFEVSKKELQFWDVKTKQWAFASGEYQFMIGGSSQDIKQQKSFRLKP

SEQ ID NO: 87 - protein, 630 aa, Hydnomerulius pinastri
MPPSDFKNADVDGIVEKLTTDEAILLTAGVGFWRTHEVPRLGIPAIKVRTDSETLLIRITDFKNADVDDIIEKLTTDEAILLTAGVGFWHTHEVPRLGIPAIKVCDGPNGIRGNHFFMSTPAKCLPSATALGATWDTELIEEVGLKLLAGEAKLRAAPVILAPTCNIQRNPLGGRAFESFSEDPLLSGMIAAAYVKGVQKGGIGSTIKHFVCNDKENDRMAYDSILSERALREIYLMPFMLAQKYAKPWAFMTAYNRVNGTHASENRHLLQDILRNEWKFDGLIMSDWFGVYSIDLSINAGLDLEMPGTNKWRMLDLMNRSITSRKLTVRTVKERARKVVELAKRVAQEAPEMAEAVKLASEADVVIAVVGLNADWETGGYDRKTLALPGRTDELITKVLAANPKTIVVTQSGSSITLPWADSVPAIVHSWYLGNSTGAAIADVLLGNKNPSGKLSLTFPKRLEDISGHGHFHSENGVGYKHFQHRGIAPQFAFGHGLSYTTFAYSDLQLSTPVVANGDFSLSATVTVTNTGKVAGSEVVQLYVSMPKTSDLTHPELMLRAFHKVKDLASGASQKVTITVDKYAVSYWEDRITRWVIEKGEYGVKVGSSSDSLPLSSTFVVSKGLEWNGL

SEQ ID NO: 88 - protein, 797 aa, Nocardia farcinica
MDVRDETAHAPALTLDEKIALGAGATFWTTHAAPGIRALTLTDGPSGLRDPGELGDHLGIARSRPATCFPAAGTLAASWDVDLVAEVGAAIGTEAIDQNVDVVLGPGVNMKRNPLCGRNFEYYSEDPLLSGKLAAAWIRGVQSTGTGTSLKHFALNNQETKRMTIDVRVDDRALHEYYLPAFEIAVREGDPTTVMTAYNRVEGVYCSENRRLVTEILRERWGFEGVVVTDWGAMNDRVAAYAAGVDLEMPGNGGASDAPVRAAVAAGRLPESILDASVERLRVLATRTADRVRHPSPDLYDRNHALAHRAATESGVLLKNDNALLPLRPGTPVALIGALAEQPRYQGTGSSHVQPTRLVGLRAGVADYTEVTYAAGYRIADEPDNGLLAEAVALAETAPTVIVCVGLTEIYESEGFDREHMRIPTNQIALLEALAHLADRIVLVVVGGSAMEMPWESSASAILHMQLAGQAGGSAAAALLFGAANPSGKLTESYPFHYRDVVNSGTFGTDPAQAVYLESMYCGYRYFDSAEHPVRYPFGFGLSYTSFDYSDLRVTAHGEHTFDVRVTVTNTGDRDGAEVVQLYLAPRTGGVHRPAQELRAFTKIRLAAGESQEATLRLDQRSFAHFDPAVQDWVVEAGTYEVRVAASSRDVRLTTRLDVTGAEPRRVPVSDWYHRPSGAPTPADFATVHAPFPRLLAPRRGTFDLDSTILDMKDSSLACRILYRFVERAVAQRAGLPIDYGNVRFKMLIYSSADLPIRTMARMSAGMMSPRLARFFVDSANGRTVRGLWSLLRGGPA

SEQ ID NO: 89 - protein, 771 aa, Bacteroides cellulosilyticus
MNARTLFIGCLTGLLLPLSTFGQGAEEARELLMQMTLREKAEMVIGHLSAMQKVNPMNPDALRELDFTYPGLGMPIGGCPRLGLPVTICSDGSYGLKRYMPMADGKYYTTVFPSPFSNASTWNTHLLQQLSAAYAREGREAGVQVLLGPGMNIMRDPLCGRNFEYYSEDPLLTGSMGAAVVSGIQSQGLAATPKHFAANSQETDRVVNDSRVSERALREIYLKGFERMIQQAAPVFVMTSYNKINGRYTSEDRHLLQDIVRGEWGFKGCFMTDFGGLGWSPDQIAAGNDLVMPGSSYHVQNIVHAVETGQLSQADLDACVSRLIRANQWIAQKQTRVPGGQQTESDRQRLAREAATEGFVLLKNDQMLPMDSKDEVAFFGIGSYYTAISGIGSGRINADYRVNIADGMASQQCAAVAKFYQSRLKAFRDSLPPPSGLAAIMGSDDPVVPEWLPSVELIEQSARETTAAVVTIKRCAGEGYDRKAVEGDWLLTQEERWLLNRVAQAFHSQGKKMTVILNVAGLVEMASWRDRADAIMLVWLPGQEGGNAVADVLTGRISPSGRLTATLPLRYEDVPSYGHFPTGVEKSIDVTENGFQVENVQNPVVAVFENGKKRRHDKPDSLQVENLDYTCFTEDVFVGYRHYDTQQSDVAYPFGYGLSYTTFAYDVEGLVADHTVSVTVTNTGRFAGKEVVQLYMVPPSESIKRPAHELVAFAKTHLLQPGESETLHLQYDSRDLCYYDESRGEWVKEDGLHRLQVAQSSRDVIKTIDIP

SEQ ID NO: 90 - protein, 858 aa, Fonsecaea erecta
MGDAGQRLESILQHLTLPETISLLSGKDAWHTASIPHQGIPSIRVSIVVLIDNQVPFAEGLVPINSFQMVPAERRTFQATSTTCFPCPIALAATWDVNLVKEIGTQMAGQAKAQGVHVILTPTINIQRSPLGGRNFESFSEDPVLSGTLASSLVNGIQHEGIAATVKHFVCNDQETNRTKIDVIVEERALREIYLKPFQIVIRNAQPWSIMASYNRVNGLHVSEHPRLLNQILRKEWDWDGTIMSDWFATYSTSEALKAGLDLEMPGKTEWRGKLVLRLLHAGKIEPPVLLERARNVLNLVEKTRASGVPEDAEEREHNTPEVREANRKAATESVVLLKNATQLLPLKTPGRVAVIGPNATEDLYCGGGSSMVFPYYYVSAYDGIKQALAEHSPSSELAFAQGCYKHTLLPLLITESAPGQKGLDLEFYDRDFTQEPDAQKVAETHSLTWRLVFLGSLPKAALPVVYGRLRGTYTAPVDGDFEFGVVTTGKAKIYIDGELLVDNWTKQERGPFLFGLGTKEVRGVKKMTAGRQYEILTEYSNRSSLPDRTGTDLGGGILRVGVCRIVSPENLLNDALEAAALADTVICVVGTDQEHESEGWDRKDMKLPGTQDQLVEAVLKGNPRTVIVNISGSPVEMPWIDEASTVVHGWFMGSELGNALADVLFGKVSPSGKLPITFPRRLEQNPSYGNFPGENGRVRYAEGILVGYRHYSTRHVPSLFPFGHGLSFTEFQYSELLLNGDNTLEPEGAVSVSFTLKNTGSYAGHETVQLYVSALNSSVFRPLLELQGFQKIRDVQPGESRKVTFTIDKYAVACYDEESEKWMAEAGKYRVSVGASVEDLRLATFIQVPTTFRWSGL

SEQ ID NO: 91 - protein, 835 aa, Unknown
  Bacteroides sp.
MKIVEKRWYACFLLLIVAVCMQAQDREKKIEALLSTLTVEEKVSLCSGGFSCFKGIPRLNIPDVGWCDGPRGPNGRAGATAFPSGILFGATWNPEIVERAGNVMGEELRAMKRSILLGPACNILRDPLCGRFFEYYTEDPCLNSALTVAQVKGIQSQGVAACLKHYACNNRENNRNYYMSVIDDRTMHEIYLPAFKAAVEEADVQTVMTSANGMNYEFVSDSRKMQTDILKNRWGFQGFIMTDWLQTRSTEKAAFAGLDVSMPGGDACGFGKALLDAVKAGRVSMDVIDDKVRRILRVYDYIGILEREDRSAGATISTPEHHRTALEVAEQGIVLLKNEKNALPMNAQKLKNVLVIGPNADKRFCLGGMGGSSWMESTYEVTVLQGIKRLLGENKVSYISSDELGDFRPLSAEMSPDGAGFTAQYFVQGNEQPVLTRTEQSVDFMWEMKSPDASIPADKFCEARFEMKFVPPVDGKYTFRFTAGGGIAYVFNNEWAGAPVTIAHPGKGEGTVSASLDLKKGVMLRLCLIYQKDKGDAAVRVEWQSPQTKLAARQWKQIEHAARKADAVVFVGGIDHSLDTEGRDRLSLTFPQLQETLINRLAKLNKHTHVVLINGSPLEIGGWLSNVVSLTEAWYPGMEGGTAVANILFGKTNPSGRMPFTWPKKLEDAPSYKFGYQDNDNVLYTEGLKVGYRYFDTAQMEPEFTFGYGLSYTTFDYRNLQLKKTGMATVSGSVEVRNVGSRDGSELVQVYVKPLRPSVERPQHELKWFKKVFVPAGESVRVDFELDEEAFSYYDVRQGGWKVDIGEYEIELCRDSRNVIESFRIVLDSESDLEN

SEQ ID NO: 92 - protein, 434 aa, Tannerella forsythia
MDLGGVAYTRNMEQAHTDSLISMSEIDDAVSRILRLKFEMGLFESPYVQPSRATEIIRSKEHNRLARKVAEESIVLLKNNANLLPLSKNIGSIAVIGPNADNLYNQLGDYTAPQPEEHIVTILEGIRNAVSPTTVIRYVKGCAVRDTTQSNIDEAVRAANASNAVVLVVGGSSARDFRTKYIETGAATVSSRENELIPDMESGEGYDRKSLTLLGHQEKLIESIAATGKPLIMVYIQGRPLNMNLADKKASALLTAWYPGEEGGNAVANVIFGDVNPSGRLPISVPRSTGQLPVYYSLGKSNDYVEGTSTPLYAFGYGLSYTAFEYGNLTISREGGNITVSCTVTNTGNTDGDEVVQLYLRDHVASVSVPPVLLKDFAKISLKKGESARVNFVLTPEQLAFFNTDLKRVVEPGEFTVMIGAASNDIRLKESFVY

SEQ ID NO: 93 - protein, 460 aa, Microbacterium esteraromaticum
MMSNLDGVRWGSATAAYQIEGAVDLGGRVPTIWDVFTAVPGNTTRGDTGAIACQAYEKPEAMLEAIEWLGLETYRFSVAWSRIITGPGGEVNPEGVAYYRRILQELRDRGVAPVVTLYHWDLPQWLQERGGWASLATADAFVHFVRVAAAELGDLVDDWITVNEPFCAAFHGHLSGLHAPGIRDEATALRAALMQLHAHGEAVRALRAVDAGFRVGLAMNLSDLEPASDSPADIAAADRADLVENRLFLHTLLQGRLPDGTVDYFGADAVDAAVDGIDVARIAEPMDFIGINYYEHNVVRAAELGTDLVVRGIEKLPVPEPRSANGVAVRPDGFTRVLLRVAALTPDLPIWVTENGIGLWDYVGPDGTCDDVERVAFIERYLDALETAIAGGAKVEAYYFWALMDNFEWPFGYQLRYGLFYTDYPTGTLMPKASAEAYRAHIARGSTSIDETVRRNGAAA

SEQ ID NO: 94 - protein, 420 aa, Unknown
  bacterium
MESRCFNQSLSRLIEEGILPLGTLDEAVRRVLRIKYLLGLFEKPYTDPKLEKEVMLARPHLELARLMARESMVLLKNDGNLLPLARKGITVAVIGPLIDSRADLLGTWRCEGDPAQVVSILQGIRTALGDGAAILTAHGCDVTGTKGESIPSAVAAAQKADVVIAVVGEDASMSGEAASRARFGLPGMQEELLRALKGTNKPIVAVLLAGRPLEIPWAADNIPAILMAWHGGTQAGAAIADVLFGDYSPSGRLPVSWPRSAGQLPLYYNFKNTGRPTTDQKFTSRYLDIASTPQFPFGYGLSYTRFEYANLQLDRKEIGPGGQLKVTVEVRNTGEKPGDEVVQLYIRDLVGSITRPVRELKGFQRIHLEPGQARTVHFSLGSDELGFFNARNEYVVEPGEFHLWVGPNSAEGVQGKFTVR

SEQ ID NO: 95 - protein, 798 aa, Candidatus hydrogenedentes
MFSDNRSVFRLLTGSILFAGLLAFFCWYSPCSHAMSVEEEAAYIVSQMTLEEKIGVLVGDGRYVPDFEKNTNDAGQGMIIEDMRSQVIIPRLPRLRTTAMSDGPAGLNREAKKDGEENFEYTTAFPTGTCLAASWNMELVKRIGDAFGNEVREYGYELILAPGVNLHRNPNDGRVFEYYSEDPLLSGKSAAAMVQGMQQHGIGATLKHFMAHNQQANRHHFNAVISQRALRELYLRSFEIAVREGHPKSIMTSYNRMNGLYTDENVELLQLLTRQEWGFDGFYITDFDGKGSALGKVRAGINLLMSGSPEEFDELLTAVKNQKLDEKLLDERLTKYIEFKLSCPYALGEEISANPDLEAHAALAREAAAEGLVLLKNDNSCLPLEKAERVALFGKTAYSLIPYGTGSGEVRSHKRSLSMHDGMKELGFQLVEGMDKDYLDYVEKIKRENKVPDYFNNPKMRADNGIVGDQAPKHFKGRLVAFSRERVLSREEVEGYAGRSDVAVICFGRSSGENYENGYLPITDIERTLLETVCDVYHSAGKKVVVVLNVSGVWETASWSDLPDAILMAWLPGQEGGGAIADVLSGKANPSGKLPDTIPVKYDDLPSAPYYPGTPKEEPLNSLYNEGIYVGYRYFNTFDVPVAYAFGHGLSYTTFEYSDLKGDKEIFDGSITFSVKVTNTGDRAGKEAVQLYLTAPMDKLEKPEQELKGFAKTQLLQPGESETLQFVLDGRALASYWSGISAWVADAGVYVVSVGASSRDIRQTKTFQVPDGLVVEKTHDILFPDYLLNELSRNRKAF

SEQ ID NO: 96 - protein, 766 aa, Unknown
  Bacteroidetes bacterium
MGMKKITILILTGLFWGACSPEAIGQYGTIQLNQTNAEQVLEAMTLKEKVSLLTGEGLIGSSIGAAGATKKLSRQGIPSLELSDGPAGLRLRSTSTTWYPSASLLASTWDTSLISAVGKAMGAEALAHGADVILGPAMNIHRHPLCGRNYEYFSEDPLLTGIAASAMVRGIQENGTAACLKHFAANNQETNRDNNNVIADERTLREIYLRGFEIAVKESAPKTIMSSYNRINGTYTSEDSLLLTTILRDQWDFQGLVMSDWFGGRNAPAQIRAGNDLLEPGRNWQRRAILKAVRKGELAEETINTAAGRVLRLVLDSHAYRKQAQKDSPSGTGIQDSACQAGYRAIARDAAAEGMVLLENRNALPFNDSIRRIALFGVSSYRLVAGGFGSGEVYADHTVSPAEGLQEAGYLPDPQLRERYQSYTDSVNRAYKRKWKTITQRITGQGLPTETDPGAEAIARSAVENQVAIITIGRRTGEFTDRTIEGDYLLSEEEKALIGNVCKAFQAVGKPVVVVLNVGGIVETASWSGLPDALLLAWMPGQEGGRALADIVSGKKTPCGRLPVTIPAYLEDLASHKNFPLEGVPVKWLSMMGKKEKKTAAERLNIDYTRYEEGIFVGYRDVDSHRKEVAYHFGYGLSYTSFLYAKPDVRVEPERIVVQCVITNTGEKNGREVVQAYVSAPEGMGDKPYQELKGFAKTPLLGPGESCMAEIIIPMERLASYVPGTGWVVDAGDYTLRIGSSSRNMQQEIRLPGIPGLILPPGGRLP

SEQ ID NO: 97 - protein, 869 aa, Penicillium solitum
MATRDIDTMVEALTLEEKVLLLSGVDMWHVPSISRLGIGSIKTTDGPSGARGKFAVDGPKAAFIPGPVCQGATWSRAQIHKLGRLLCREVKTKSAHVLLAPTICCARNPLGGRNFECFGEDPLLSGKLAEQYVNGVQETGEVAATAKHFVANEQEHLRFSIDAKISETALREIYLRPFEMIVRMSSPPKCIMTSYNKVNGQHMDSNVPIIKDILRNEWGYKGLVMSDWGGTNSTVESLLAGLDLEMPGPPERRGEKLLQAIKSAPSDDLLAAVNASVGRILALADKFDLLGLSSEEVDRTRDSQEVSSTAPEDIQLMREVAASGIVLLKNTKQTLPLQANNIHRKQIAFIGPNALNGTPGGGGSASMNPQYLSQPMESFKTVAAKHEIDVTVKYALGAYSQKWLPLFSNDQWGINTSMESDNNPLVRVEYFATNDFTGPVVETQYRNSSNIDVSDSCPVDFQVDPVPPYSYRVTSSLVPTATGEHSFSLSSVGGSRLFIDGQLVIDSSHWTELGETFYAFGSAEVSASKPLVAGKAYTVQVEAWVNICEFSANASSADANHVFAAHPSVRIGYLQQIPSADKLISETVALANESAVTIVVLGLNEEWESEGYDRKSMALPGSQDKLVEALISSVERPESLIFVNQSGSPVELPWIEKASTFLQAWYGGQEAGNALADVLLGNTNPSGRLPVTWPRRYTDLPFYWNKETWPGIDEVVKYEEDTQVGYRWYNHHPDVLPLWWFGYGLSYTIFSSKLTNVDDMGIYWSVGVQVKNAGMVDGQEVAQIYNWPAGQIEKTLLVGFEKTPFLRPNEEITIHVQVRKRDAAHWIGGKWVLDEGGYAFGLGNGVKDAMKTSLEIKVENHTWSSREYE

SEQ ID NO: 98 - protein, 382 aa, Weissella soli
MIKGVNLGGWLVLEKWMSPQLFAGVAADDEYYLPQDLSETDYQNRIAMHRANFITEADFVRIASMGLDTVRIPVPYFIFGDVQPFIGAIDWLDKAFNWAEAYGLQILIDLHTVPGSQNGFDNGGISGVQNWAQHPDQVAFALSVLHRLAERYGDRSGLYGIEVLNEPATEKMYRNMLDRYPAREPEMTAENAPITFEFLYDFYKTAYEDLRTVLPADKVIMFHDGFDITQWADFFQKNTFENVVLDTHHYLMIAEIETGELTLDSYHKYIEGVGDSIAEVKQFVPVVVGEWTLFNSLATGVDTKGGLNPTQEVFDHEVTVDKDRALKIYQDLWRLQVDQWQRGDGYFFWSYKINIDTINDKDWFGWDSWSLERSVNKGWAEI

SEQ ID NO: 99 - protein, 730 aa, Acetatifactor muris
MNRDNLLVKQPFDPGCYTEQVNQLLERMTVREKVGQLNLDHVSDSGDLTDCNLGERSSMEAEAEKVRRGLVGTMLMKGREEANYFQKVAVEESRLGIPLLFGFDVIHGHKTVFPVPLGGASTWDPQMLEEAEEYAAREAYADGINWIYAPMIDLCRDPRWGRVAEGAGEDPLLGSLIAQAKVRGLQTVNPETGYPYVAACFKHFCGYGLSQGGRDYEECETSPRTLFMDYMKPYQAAVDAGALSTMSAFSVLNGQAVTGSRYYLTEVLRKQFGFRGFVCSDYGAVKELVHHRVAADRKEAAAQALLAGVDEDMGSHAFADYCEALYEEDQRFAEAVDEAVRRILSVKFAVGLFEFPYFPEEAEKYMLAPEAREAARNVGRHSIVLLKNQEKILPLSPSKKYFLTGPLSDNVEEMPGAWAQYHPGTNVISVKMALEEAGLDFLQSDGCPFTGKYCFDSQDDSGFAKALKMAEECDEIIYVCGEKAAWSGENRGRVSIDLPKQQYRYLRELKKTGRKIISVLMCGRAMSCQELAESSDALVLAWHLGTEAGHSIADVLLGSYSPSGRLPITFPCYTGQVPYYHSWLSSGRSRESLIRYKDGENGPLYPFGYGLSYAEITYDAVHISRNRWKADETIRLEVVLTNHSEMDAYEVVQAYYQDVVSSLPTPDRKLCGFTKILVPAGSTVKAQMLIPVERLALMTLDLKEVVEPGEFILFVGRDSMCGESARIVVE

SEQ ID NO: 100 - protein, 830 aa, Corynespora cassiicola
MADIDVEDVLSKLSLTEKCNLLSGGSFWRTHAIPRLSIPSLCITDGADAVRGSRFFNSTPSICLPCGSALAATWNTSLMQRLGALMGDECRAKKAHVLLSPTINIPRSPLAGRIHECYGEDPYLAGMLAGFFIRGVQEEGVVATVKHFVCNDQEQGIFAMDCVVSERALREIYLRPFELAIELGQPGAVMTAYNKVNGTHVTESVDLLRDLLRGEWKYQGLVMSDWFGMYGIRGAVEAGVDLEMPGPGQWRGKQLAHAVAARKIDIEVVDDRVRAVLNLVKRATAAGIEGTDEETLDRPEDRALLREAATESIVLMKNDDNVLPFDPSKPIAVIGPNAKVAAYRGGRVAHLRPYHTVAPFEAIKDKSTAEVLFSQGLYNHWELPLLGAQMRTSSGKVGYDMYIYSGPPGSTEPRKRLDHYELLNSCGFFFNYPDKNLRRWSIDIEGTFTPDTSGLFDFGVSVQGTASLYVDGELVVDNTTNQKKADGFFRNGTIEEVGSMHVEAEKTYQILCRWNSPETSALLENDEQTFKPGNIRLGGCHRLDTDEAIAAAAQLAAEVDQVVVLAGFIGEWESEGNDRKTMELPPNTDGLISKVLQANPSAAICISSGGPYCMPWVNEAKALLQVWYGGNETGHAISDVLYGIKNPSGKLPITFPIRLQDNPAFLCSHADYNQVLYADDIYVGYRFYDTVDRETLFPFGHGLSYTQFEMGNIEAFVEGDVLLVSCTVKNVGSRDGVETVQVYISQSSPSIRCAAKQLKGFEKVGVRAGETERVTLRLDLWNATAFWNVDKHQWVREQGDYNVMIGCSSRGRFGHALFSLPSTEKRVSGK

SEQ ID NO: 101 - protein, 882 aa, Meira miltonrushii
MSAPIDPQALLAQLTLEEKIQLTAGADLWRTVAIERLKIPYIKLTDGPIGARGGGDFHDSTPSTLFPSPSCLGSTWDTKLAYEMGKQIALDGIEKQCHVILGPTINGQRDPRAGRFFESYSEDPTLMGFLASHWVQGVQSCGVGATMKHFVANEAEYDRRNNSSDVSIEALREVYLEPFRIIMADMQRKASAHDDPFKFQPACVMTAYNRVNGVSSSENDAMITDILRKEWGFDGLVMSDWFAMHANAFNATDLEMPGPTIFRTIEKTIDTIKKGDEEGKKMAKDLDRCVLKVLELVKKVHKLGYQKSVADEVEKSVPIEQVGPAIRKIGAEGAVLLKNDNDILPIIPKKDLKILCVGAPWIEAVQSGGGSANLTPQKVMQPLSTFKDALKNEKGGQDVTVNHHNGIGIHNFVKPLEQSIKLDFLTGRQPGKGEVVASTTGQKATLSTMLPKPKEVPWNDYWVRGSLDLEPVKKDCQLRFGLLGLGTITAYLTIDGDKSKQSIWNFDGETDLFESIVNPLRNWQENVITVKAGQKIQIEAHFVPRLVGKEHGDAKYGGFQIGMEEVDDEDALIAEAVQQAKEADLTVIMTAVGKDWESEGFDRPTIFLPRRQDDLVNQVTKACPGKTVILNLTGSVVEMPWRNDATGIVQCWYGGQEGAVSLSDILLGRGDAPASGRLAHVWPARIEDHPSGVDEAYFPGTHLPNDKEGPHTEYVEGRLVGYKYYNKNKNANQPAFHFGEGLGGYTTFATEGPVVKGSTKINKSSLPLSLTVKSTNKGKRSGKEVAQIYLRPHVPLSDAKDEPIQRLAGFAILRPAPGQSEEAEIQLYQETFSHWDEKSRSWQVKQGDYDLVLARSARYGEELGKATITIDQSWSWTGTGVN

SEQ ID NO: 102 - protein, 832 aa, Bacteroides fragilis
MKATTSLATSCRRLLLWGVLTLQCLFSTAQKRFTADVEQQAEKILSQMTLDEKLSYIGGINWMYTRPLERFGIPRLKMSDGPQGLGTHGPSTAYPCALMLAATWNEQLATEYGSALGKDCRARGVHVLLGPAVNIYRAPMCGRNFEYMGEDPYLTSRMATGYIKGVQGQGVMATIKHFIANNSDYDRDHISSDIDERTLNEIYFPSFRAAVQEAEVGAVMSSYNLLNGIYTTEHPWLLKDVLRQQWGFKGILMSDWGSTHHCIPAVKGGLDLEMPAGSKMQPEELKYYLRTGDITIETIDEKVRHILQTLLAFGFRETQQPDTHIPLKNPQCAQTALNVASEGLVLLKNTNQILPIRSGKVKTIAVVGKNAQGYVCGGGSGEVHPFQYVSVLDGIRKEAAERDIRVEYLDVYDYLPTIIFTDTERKQKGFRAQYFDNMNLEGTPKVEQTETKINYSWSGGTGLKEMPKEQFSVRWNGTICPQETDEYLFTLGGDDGYRLYIDGKLIADEWHEGAFRNSTYRCMLEAGKKYDLKIEYFQKGGGAAVNFIWKQKNASNNLFVEALNRNDLVVACIGFNSDTEGEGRDRTFELPEDEAQLLQNTLQSKRPVVGIVNAGGNVEMQSWEPSLKGLLWAWYGGQEAGTAIARTLFGELNPSGKLPITFEKRWEDNPTFHSYYDPDGDKHVEYAEGIFVGYRGYDKLKREVQYPFGYGLSYTRFKLSAPTVGTPKTDGSVTVTCKLTNTGRTAGAEVVQLYVSNKDTTVEHPEKELKGFRKVYLEPGETKSIEITVPAEAFSHYDTGSRRFVIDRGSHDILLGFSSRDIKAKMSVGISR

SEQ ID NO: 103 - protein, 760 aa, Malassezia restricta
MVDWLERVLTSGRAPYQTRDYAVYRNVHDYGAKGDGLNDDTNAINSAISDGPRCGPQADSTTTAPALVYFPPGIYRVSKPIVSLYLTHLLGDATERPCIKPYAHFEGIAVIDENPYGFSGKNWYTPQNNFFRSISNFCIDLSEMPPEYGTGIHHQVSQATGLCNVHFEMRTDPSTQQRGILMENASGGCMSDLTFYGGRFGAWMGNQQFTVRNVRFSQCQTAICLHWNWAWTLMDVHIHDCHVGLEMVGMLPERQGVGSLILSDWYIAHTKHAVQLEREGTGRLILDHVRVSHVQSIVHGPYQSLLSPRDSNDLVKYWLKAPASLVTAPTALRRQETLDGPIYVGDMIPPERPACLVDEHGRWFGREKPSYATWSDVVNIQQYGVKGDGMSDDTAAMQSLLNENVGRVVFVPYGVYVLHDTLNIPIGTFLVGEAQPIFLGTGPAFQDVQNPRPVVRVGRPGDSGDLLLADLVFSTRGHTPGAIVMEWNVHERAQGSVAMFDAHIRIGGFCGSEQELAQCPKQASLTDLPRAAFLSLHLTKSASGYFQNVWVWTADHELDQGTPEQLNVLTDRGVLIESQGPVWMYGTASEHALLYQYSLHHAANVLLAMIQTESPYFQGHNFEPASKSVVSHPKYPDPDCAKRYARGPNVPDWTYDTVMEDRALGLHISHGTDIFVLGSGQYSFFDSYGQRSLADHACQRRLCVLERDLSNVWLMNLASVGAQVILSVDGADYVMERPHREGFCSTLSLCAISAEHIYVV

SEQ ID NO: 104 - protein, 841 aa, Fusarium euwallaceae
MASLRTDDVEQLLQLGYMANQRDKPARHRLPQDGPSGARGQLAVDGPTAAFLPGPICQAATWSKQQLRSVGRLLCEEARTKAAHILLAPTICLSRNPLGGRNFESFGEDPFLTGSLATEYVAGVQETGQVMATIKHFVANEQEWQRFTIDAKVSEKALREMYLKPFEMVVRSNTTPGCLMTSYNIINGVHADMNRRLIQELLRGDWGFKGLVMSDWGGTNSTVESVIAGLDLEMPGPPSKRGELLLDAVKKAESPDELLKAIDSSAGQILSMCKRMGLLGLSEEEALQTRTQLEQSSTTQEGMKLMRTVAAKGAVLLKNDKSTLPLKPASLSGKQVAFIGPNALVGTPGGGGSATMNPQYLSQPMTSFKAAVEAQGLDTRVVYTQGAYSKKWLPLFKKDQWKSRSSGEDGKNLVRVDFYTTRDLSGPILETQHRNSSWVDFVDSAPLPLQKAHVPPYSFRVTSTVRPQTTGNHRFGVASVGEARLFIDGELVLENCNWTETSEAFFSFGSREKISSKHMNAGQTYDLVVEGWTKPGLSEEESLHFFAGHPSVRIEFEEELPKNMIDTAVKTADESDYSVVILGIDDEWESEGYDRQFMELPGTQNELAEALLTRCKHPERLIFINQSGSPVELPWEDKCSTLVQAWYGGQEAGNGLADLLLGVTNPSGRMPISWPRKYTDLPYAADKEMWPGVDGKVIYKEECHLGYRYYLHNNVQPHFWFGYGLSYTQFESSVQLEVRNPDSWGFNVTVKNVGSADGEETIQLYAWPSRKEAERRLVAFDKTPMLKPGEEASSRLTVRKRELASWEGGIDGQWVFPEGVWQFAVAKHAGDIDVKAIEVPV

SEQ ID NO: 105 - protein, 782 aa, Psathyrella aberdarensis
MSSSDIEDIISKLTLSEKIKLLTGLGWWHTEPIPSAGIPSMRFSDGPNGIRGTRFFNGVPSNCFPSSTGLAASFDLELAREVGEALGEEARAKGILVQPREGEVSERALREIYLKPFQIAIKESNPWALMTAYNRVNGVHVSEDSRLVDGILRKEWGFQGMVMSDWIGVYSTVESIKAGVDLEMPGPSVMRGRAVERAVIAQKLFPADIDARVRKILGLLKHARESGIPFDGPEEPLDTPATRAILRKAAAESVVLLKNEKGLLPLGEQVRKIAVIGPNAKVAVTSGGGSARLRSTYTVSPLEGIVEAAKKTGAEVTYALGTSSYRQLPVLNPYISKADGGPGMDIDFWNDEPSADFLALQPEFTGQFKGPTWTTSTLNTECIMFDGIVDCWMRFTCTFTPDESGDWEFELNLAGRGNLFVDGKLILDLSTNPPKGESFFELGTASVRAVVQGLKKDQAYRLELRLSSVEFVGRGPPIQCWGGIRLSAIHKTDPEEGIKKAAQLAKESDVAIVVVGLNHDWETEGHDRADLELPGLTNRLVSEVLKANPATVVVNQSGSAVTMPWAKEASALVQAFYGGNELGNGLADVLFGRVNPSAKLPLTFPARLEDVPSYASFGDRVQEHGKVLYNEGVFVGYRGYEIKNVQPLFSFGFGLSYSTFQYDNLEVTAPTPEGSFNISFKITNTSNIAGKEVSQIYVSDPESSLPRPRKELKGFAKTELKAGETKRVQITLDREALGFYDDRQARWVAEKGIFRVSVGQSSDKIVLEGEAKLEERIVWTGL

SEQ ID NO: 106 - protein, 888 aa, Aeromonas hydrophila
MPPSTLGLTPPFDATLLTTRPPCSRRHISRSPGARRPSPGLLTCLQPNVCPRARSAFLAISNGSRQQSGPARADAFHPVSISPFYFYSDSYEDVFMPITTKLKAVSLGVSLALAGLLVGCNQNDSDPLVKDDAYYRGQAEAMVAKLTLGEKLDLLSGPGYGSANGAINVKQDVPGVAGYINGVLRSADGIDIPALKLADGPAGVRINANRDGDSASYYATAWPIGSLLASSWDVKLVKAVGEAMGDEVRQYGVDILLAPGMNIQRNPLNGRNFEYYSEDPLLTGKIGAAMVNGVESNGVGTTIKHYFGNNSETNRNQINDIGEPRTFREIYLRGFQIAVDEAQPWAVMTSYNKVNGTYVNERRDAVTDLLRGEWKFDGLVMSDWFAGDVANNAYKQVLAGQDLIEPGNVKEQLQQSIEHGDLDEAKVNEAAIHILTQVMKSPSYNQLAISNSPDLIAHAKLARQAGAESMVLLRNDAAALPLAASSTLASFGINQINTYKGGTGSGDVNAASTTTIAQGLAARFPVNEALQSYYRDFYENNKVYHEGQFGAKGYYTCAEAPISGDLAALIANAATTQQAAVISIGRQAGEGADRSSGKGDYLLGDDERALIDAVSSAFHAQGKKVVVVLNVNGVIDTAQWSDKVDGILLAYMAGQETGHAVADVLSGAVNPSGKLAQSFPHSYASVPSAGTFPGEDTDGDGEPDDLYYNEGIYVGYRYYSTFEQAVSYPFGFGLSYTSFSYTSPAIASNTLEGGSAGNLVLTATITNTGAVAGKEAAQVYVTAPEVKLKKPLIELKAFAKTAQLAPGASEQLSFTIPASILASFDEASNQWIVEPGRYSAYISPSSDVSASTPVSFTVSKEIVVSNTTPGALALPAGVDPASVTTITR

SEQ ID NO: 107 - protein, 808 aa, Saccharopolyspora erythraea
MTGGERVKRLVIRIAPLLLVVPLLVAAVSPVRHSQRVDELIGQLTLDEKLSFVYWDYNEKDPLAKLWLPGVPRLGIPQIRGTDGPAGVTIHQPAIAMPAPVALASAFDDRLAHEYGTVLGREGRAFEQDIILGPMVNNIRVPQAGRNFETFSEDPLVTARTAAAQIRGIHSQGLMTSAKHYAANTQETDRFTIDVDVDQRTLRELELPGFEAAVAAGATSVMCAYPKVNGTHACGHRQLLTEILKEQWGFKGWVMSDWTATHATEDLVAGLDQEMGVEVREDGSLFRGKYLGEALKKAIREGRIPESALDASVRRILTQFERFGLLDETKPPRPERDVAGGTRIAQEVAESGAVLLRNEGGVLPLDPAAGQDIAVIGPSAQQPKVTGLGSSYVEPDFANAPLDTITQRVGSGGRVGYSVGEELKGAPIPETALQPAFVPGEVTPPPSGGVIYDGRLKVDADGLYRIAARIDGGNGSLQIDGGAPIGVGDVFGPLTSVPVWLTKGEHTIQMTGAAPVGGGSLDVDLTWVTPGHAQREFDAAVERARDSDVAVVFAYDDGAETADRTSLSLPGTQDKLIDAVASVNPNTVVVLNTGSSVTMPWLDKTRAVLDMWYPGQAGAEATTALLFGDAEPGGRLTQTFPVSQERTPVGGDPARFPGVDGKVHYSEGIFSGYRWYDREGVDPLFPFGHGLSYTTFERTDPVVERTRDGLDVTVTVRNTGQRRGSDVVQVYLGPSPQVPLDQAPRQLAGYQKVELAPGETKRVRVHVAERALQHWDEAAGGWKLGGGKRAVEIGSSSRDIDLRADINL

SEQ ID NO: 108 - protein, 477 aa, Streptomyces sviceus
MSTAQPLSFPAHFLLGSATAAYQIEGAADEDGRGPSIWDTYSHTPGKTWNGDTGDVAADHYHRLDEDLDLMASLGLKAYRFSIAWPRIQPTGRGPANPKGLDFYSRLVDGLLQRDIVPVATLYHWDLPQALEDEGGWTNRATAFAFADYARVVGEALGDRVAIWTTLNEPWCSAYLGYGAGAHAPGRSDGAAALAAVHHLNLAHGLAVQQLREVTTNDPQYSVTLNFHVLRGEGDGAEEAVRRIDALANRAFTEPLLRGQYPQDLLADTASVTDWSFVEDGDLALIHQPLDLLGVNYYATTTVRLWDGTTARQNNDGHKDMGGSPWPGSPQVEFVAQEGPHTAMGWNIDPDGLEELLLDLHARFPDQPLVITENGAAFEDHVVTRSDGSHAVHDPERVDYLHRHFVAAHRSLTAGVDLRGYFVWSLMDNFEWGYGYSKRFGIVHVDYETQRRTLKDSALWYRELATTGSIPTPGAGE

SEQ ID NO: 109 - protein, 865 aa, Naematelia encephala
MAFSAKPFIAIHDRSFLDASPQDVVSSLTLKEKITLLAGYDTFSTPAIPRLGIPSIRLSDGTNGVRGSSLFKMTPAMAIPNEAGLAATFSLELVRTMGGLIAREAEARSASTVLGPNVNVPRSPLGGRTFETFGEDPTLSGKMAASYIQGLQDEDIGATIKHFVCNEQEHERKAVNSVVSPRALREIYLRPFQIALCEAPPWALMTAYNKLNGVHCSESRTLLLDILRAEWGYEGLVMSDWNGTYSVSGAINNGLDLEMCGPPKWRNPELVTSVVAARKVPIRNLNARALQVVRWAQKCARAQPELAYTTKPIEYTREDPGDCALIRRAAVESICLLKNDRHILPFTAASGMRKIAVIGPNANGRIFSGGGSANLKAQYVITPLQGLRNSAPAGVDIQYALGGTGAVFLPLLHEEVADHTGTPHYTVDFYNQTATGQIDAQPNGTITHDESNFLMIDSLPSGVTADFVAIGRASFKTNEGGTWIFGLSCAGKGRLYLDDTLVVSNWENQTRGSSFFGSGSAEEMGMYTVDAGRVYQLRFEFNSRRSAMRGADESQPLTFTGIRIGGMLHRSVDERLQDAITLAKNSDAVILVAGNNHDAETEGFDRPTLSMPGLNDRLISEIAAVNSNVVVAVQAGAPVTMPWIDKVPAVLFTWYGGSETGNAIGDVIFGRESPSGRLPITFPANERDVPAALSFKSEMGTARYTEDLFVGYKHYYARGIAPLFAFGHGLSYSTFDYSDLRVSVKNDKTPADLQVVVSCRVTNTGSVKGSHSVHFYVSHPVATTTSVIHPKWSLQTWAKVTDLPPQESEEVTVELDKYAFSHWSEMDNVWVIEPGLWTIEIRHTAELSADISGQVTLPELEWSGL

SEQ ID NO: 110 - protein, 740 aa, Hartmannibacter diazotrophicus
MMRIDDLIAQMTLEEKIGQLNLATPGGETLTGAVANQDVARKVLEGSIGSIFGVKSLATMRAFQDLAMRTRLKIPLMFAEDVIHGYRTVFPVPLGLAASFDMDLVEKTARVAAVEAAVMGIDQTYAPMIDIGRDPRWGRVAECPGEDPYLAARLAEAQVRGFQGNDLTSPDAVMACLKHFVGYGAAEGGRDYDSADMSPARLHDVYLASFKAGVAAGAGSVMAAFNTLNGIPMHANRTLIRDVLQKGYGFDGLVVADYTGIMELVPHGVAEDLAAAAVLGIEAGVDFDMVSEAYVSHLADAVAEERIDVALIDEACRRVLEAKEKLGLFDDPYRRMAGDPDKVLLAPGHRELARRAVAESCVLLQNEAAVLPLAEGSRIALIGPLADDLVNMNGTWAVSGLAKDAVTVRSAMEARCDLSFARGTNITDDPALADRLNVHDRGTPSASIDQRSPKELIAEATAVAAKADAIVAVLGESKEYSGESSSRVDLRLSAGQIALLKALRSLGKPLVAVVLTGRPLVLTDVADLCDALLIGWFGGTETGNGLADVLFGTADPGGRLPATFPWAEGQVPLTYAHLPTGRPFTGKFEKFRTGYLDIPDGQPHNDGLFGFGAGLSYTTFDFTHPAVERSALKSTEDRLRVSVEVENTGARSGSTVVQLYVSDPVASRSRPVRELKGFEKVRLEPHTRTTVHFELSADDLSFSTAETVTDLSWTFEPGKFILSTGPNSRDLQHIDIDWQA

SEQ ID NO: 111 - protein, 460 aa, Pontimonas salivibrio
MVASESPGTIRESFPDDFVFGVATSSWQIEGSSSTRSESIWDRFAKIPGAIVDGSTGDPACDHLNRVDEDLALISELGVGAYRFSVSWPRFMPGGTGTVAHSGAGFYDRLIDSLLERGVQPLLTAYHWDLPQSLQDEGGWLHPDMPRWFADYCHALGERYGDRVSHMATLNEPWVSAFLGYAAGIHAPGVVNSTQALEVAYRLMVASGHGIGALTDAGVSNPGIVLNLTTVRVDQPGAEKARDHIDRLQNTLFTDLLAGRGISDEVRDTTDILTDWSFVTDEGLEAAATPISWLGVNYYTPIRVGLPRDTDQATGVGQDTVVYPACPPASLRPRGPLTTMGWEVDPQGLRDTLVETAAALPGVPLWVTENGAAYADRVIDGDVYDPDRISYLTGHLGAAAEAISDGVPLQGYCAWSLLDNLEWAEGRTQTFGLVYVHPESMERIPKASYHFYADVAKGER

SEQ ID NO: 112 - protein, 831 aa, Unknown
  Cadophora sp.
MPSHEDVDIEQLLTQLTLDEKISLLAGANVWETVPIERLNIPSLRVTDGPNGARGSQFFDGTTAACFPACVSIAATFDRALTKRIGKALGQESQTKGAYVLLGPTVCSHRSPLGGRNFEAFSEDPILSGILAAEYVTGLQSERVGATIKHFLGNEQDTRRFSVNELISERALREIYLRPFEIVVKTSDPWCLMTSYPKINGAHVDTSQEFLQRILRQEWGYSGLVMSDWGATTSTVESLTASLDLEMPGKSKWRASEQVKPAIEAGLVSESTINERAHAVLQLLKKTGKFGDRRADIPETAQDLPEHRDLIRQAGAEGIVLLKNEGILPLKKGQHRKVALLGPLAKYAAAHGGGSASLNCHYKVSPFDAFSSHLGSDVDVTYSKGAHIFRVYPDMEEGCKNSVGNPGFTAKYWKNSAFEGEPFHTTHFPRGSFTTLMDTEVEGKLGVRFTTTYTPSKSSIPYLSFSTIGPSKLYIDDVLLFEQPKATKDSMSFLLGVQDELQSQYQFEAGKSYQIRIDTIPSPEPNGELYLLDGQIAAHLGFISQEEMELDVLSEATMLAKEADVAIVFVGNNAQWETEGQDMDDMNLPANGSQDRLIAAVAAANPCTIVVNTTGVAYAGQESRNAIFNVLFGEVNPSGKLPISWPKEYEHIAVYGNFGMDSYESRQVKYVEGVFVGYRHFDRMWGTEKEVRWPFGFGLSYTTFEVTNAAIEGNFEKPKGNGVTVTADVVNTGKVAGSEIVQVYILPPSSGSADHPVKGLVGFEKFRIEVGEKQRVSISAGAQQAAYWHVESRKWKVEAGEYILWLSTSSSPRDKKAELSVKVGKDFWIDP

SEQ ID NO: 113 - protein, 856 aa, Meira miltonrushii
MLNPTEKLFVLDYFKNNRKPFGLPWSAYTPFFPQGFRFPGYSDSRFVINVFTCCRYTHTSRDWQSAVSKAQSIVSQLTLPEKANLTGGIGSVGRCEGTLGRVDRFGIPELCFQDGPTGVRASDFVSVFPAGLTTGATFNRDLMEKRGEVMAAEFKGKGINVLLGPVTGGPLGRSVYQGRNWEGFGMDPFLVGEAAYATVKGIQSQGVIATSKHFLTYEQETFRQLYAADDQFTLNPINNTVNTYSSDVSDRTLHELYLKPFMNAVRAGTGAIMCVYNQINGTQGCENDKVLNEILKQELNFQGFVVSDWSAVFNASSAHNAGVDVTMPGGATGGGYKNLVTGQAVIDAVNDGKIPIKRLNNAVERFLTQYYYYGQDQGYPKVSYKDGYQGTYLNGSIVNEHVNVQTDDSRNTAKQISEEAITLIFNHRKENDYGPQGYIPSRKDVKGTGLPLSKKARIAVFGDDAGPNPMGINGCQLWIGPGSNLCPGNSTNNGTNAMGWGSGAGYFPYLIDPLQGLTDLTREYGSALQSNLIDTDLDGQNGKLIEQFAGQADASLVFVQARSGEDSDRTDLELESNGNALIQKVASSSNNTIVVVHTVGPVYMDDWFNHPNVTALVFPHLPGQESGNTLADMLYGNVVPSGKMPYSILSRNDSSTYVPVVREMNSNNQIPVPFDEGVFIDYRYYDKKNVTPLIHFGHGISYTTFQHSNQLKAQAVTDNSAYPTEVPQNTSVGGESSLWNYVVSLSTSVKNTGSSISGKEVSQLYIGFPQSDNLPDIPVRQLVGFKKVGSIKPNQSQNVQFKITRRDMSYWNVEQQKFVMPDGDFTFWSGASSDVDTLKGKVTVTIKNGKVSSTKS

SEQ ID NO: 114 - protein, 679 aa, Monilinia fructigena
MAESPESQMSDSIFDKFREGTNVISSRNTVATPDSEISPPESPLEKHAIFDPRTKSRQLAKTLSLEEQVSLLVAADFWRSKSIPSKGIPAFKTSDGPNGARGAIFKAGTKAALFPCGISLAATWNTELIYEVGQHLADETKARAAQVLLAPTVCLHRAPLGGRNFESFSEDPFLTGKLAIAYIKGLQERGVAATIKHFVANEQETFRLTIDSVVQERHLRELYLRPFEMAIREANPWAVMSSYNLINGVHADCNFHTLREILRGEWNYDGLVMSDWGGTNSIVESIEAGCDIEMPVSTKWRGEKAIKAIENGKLSREAVENAAANVLYLAERTKGSDMTPESPEAEDDREETRKLIRQAGVEGITLLKNENNALPIKSSQAKIAVIGPNANRAIAGGGDVAIVIVGLDAEWESEGYDRQTMDLPSDGSQDRLIDAVVEANPNTIVVNQSGSPVTMPWVKKVPAILQAWYQGQEAGNALADVLFGLENPSGKLPTTFPVRLSDNPTYHTWPGENLRSIYGEGLYIGYRHYDHLSLPPLFPFGHGLSYTTFSYSPPTLSSSILSSESPNSNITLSLEIKNTGSMKGKEIVQLYIHDVKSRLVRPEKELKGFAKVSLEVGESKVVHIDIDKYSVGYWDDSYREGKGMWVAEEGEFKVLVGGSAADIRHAISFEIKGTFTWIF

SEQ ID NO: 115 - protein, 540 aa, Hortaea werneckii
MNGILKGELNFQGFVVSDWVAQHSGIESANAGLDMAMPTSQYWNERQLEEAANTGALNQTRLTDMATRILASWFQFGQDQALPLGSGMPPNLLLRHDYTEAKSPESKASLMQQAIEAHVMVKNSNGTLPLKKPKVLSIFGYDAISQNTFVPDSRLFPQSWEAIGLGMPQLEGISSNSPVPDAPMLHNGTLIVGGGSGSNTPPYISSPFEALKARAYDDDTAIFFDFVSTDPPVVASSEACLVFINEYSSEVWDRPGIADPESDELVQNVAASCNNTIVVIHNAGIRLVDEWIDNPNVTAVIFAHLPGQDAGRAIAKILYGDVSPSGRLPYTVAKKASDYGHLLDPCEANGSESPQCDFTEGVNIDYRSFLASNTTPRYEFGYGLTYSSFRYFALQIDVNATATPNDTAPVPVYTNGTTNNNSNHSGVIVGGLALLFESVGTIKASIENTGYVEAAEVAQLYLQIPAMASNASNPTTKVLRGFQKVSIRPGETADVSFNLRLKDVSSWDVVRQAWVIPSGEFQVTVGKSVLDQSLTGSFST

SEQ ID NO: 116 - protein, 804 aa, Streptomyces netropsis
MPDDPVDVLDLDTKARLLSGQDMWSLPAVPRIGLRSIVMSDGPVGVRGVRWTADDPSLALPSPTALAATWDPALARRVGRLLAAEARRKGVHVLLAPTVNLHRSPLGGRHFEAYSEDPYLTARIGTGYVRGVQDGGVAAVVKHFVANDAETERFTVNNKVSARALRELYLAPFEAIVKDARPWGVMAAYNQVNGVTMTEHGHLQNDVLRGEWGFDGIVVSDWLAARDTVRAALGGLDVAMPGPVTVYGPALAAAVRAGDVPESVVDDAVRRVLRLADRVGALGEATRARPSAPDGRALAREVAARSFVLVRNAPVRGAPALPLDPAPGLRVALLGGAARDARILGGGSAQVFPARVVSPLDGLRAALPEGAVTYAVGAEPGDELLPAGAGFTLRAVCRDAAGRMLGEERMPSGMVQWLGDLPAGVGYEALRTVELTGTFTPRESGPHVFGTKGVGAFRLVVGGRTLFDGEQGADHADPFEAFLGSPVERGRVVLAAGTAVEVSLTCVVAEPDGAPIEAVGFCLLHREPERDAEELLAEAVAVAASADAAVVVVATTERVESEGFDRTTLALPGRQDELVARVAAVSPRTVVVVNSGSPVELPWRDDVAAVLLGWFPGQEAGGALADVLLGGCEPGGRLPTTWPVRLADAPVTRVAPVGGELAYAEGLFIGYRAWEKARATPAYAFGHGLGYTDWSYETLDMGGTGTARVRVRNTGSRPGREVVQVYLAVPPGDRAGRPVRRLAGFASVEAGPGETVEAVVALDPRAFEVWDDEAAGWRRIPGTYTAEAGRSIADRRLTAPVEVA

SEQ ID NO: 117 - protein, 520 aa, Aureobasidium pullulans
MHELYLWPFYDAVKAGAGSTMCSYQRVNNSYGCQNSKTMNGLLKTELGFEGFVVSDWYAQHTGVASVNAGLDMVMPNSMYLDVNSFATAIKNGSINSTRLDDMATRILATWYRFANLQNPGLNDAEARQAAAEATLFQGAVEGHVLVKNVNNALPLKKPTVLSLFGYDAPGGINISATSFQLKPNGKLNTQAYTNGKPYTDLDDLINSAQVLPAGFAGPEVALNGTLYTGGGSGAITPVSSISPEDAFRNQAAIDGTTLYTDFTSQNPTIKDPNNPCLVFINSQSSETWDRSTLADIYSDTLVTNVASKCKNTMVIIHSAGIRLVDRWIDHPNITAVIYANLPGQYSGTSLTEIIYGRQSPSGRLPFTQNVTPRFAFGYGLTYSNFSYSGLQMSANDSAVTSSSPPGTVGGIAAEGGTTSLHDIIATVSVSVRNTGNVAAAEVAQLYLGIPGSGVPKVLRGFEKQLIQPGASVNMTFSLRRRDMSIWDVVRQQWVLPSGAFNIMVGKSVLDIQLQGTLTL

SEQ ID NO: 118 - protein, 785 aa, Aspergillus clavatus
MTLAEKVNLTTGTGIFMGPCAGQTGSALRFGIPSLCLHDSPLGVRNSDHNTAFPAGITVGATFDKDLMYERGVGMGEEFRGKGVNVLLGPSVGPMGRKPRGGRNWEGFGADPSLQAIGGAQTIKGIQSRGVIATIKHYIANEQEMHRMSSIVTKGYSSNIDDRTLHELYLWPFAEGVRAGVGSVMAAYNDVNSSACSQNSKLLNEILKDELGFQGFVMTDWLGQYGGVSSALAGLDMAMPGDGAVPLFGDAYWGYELSRSVLNGSVPVSRLNDMVTRIVATWYKFGQDKNYPLPNFSMNTQDAKGPLYPGALFSPSGVVNQYVDVQGDHHVTARAIARDAITLLKNEDNILPLQGNDSLKVFGSDVGGNPGGLNSCNDQGCNKGVLTMGWGSGTSRLPYLVTPQDAIANISSATEFYITDNFPSTVSENYITVEGNPGDRTTAGLKAWHNGDDLVKEAAAKFSQVVVVVHTVGPLIMEEWIDLPSVKAVLVAHLPGQEAGNSLTDILFGAYSPSGHLPYTIPSSESDYPSSVDLISQPFGQIQDTYTEGLYIDYRHFIKANIRPRYPFGHGLSYTTFSFSLPTVTPGTALESAYPPTRPSKGTTPTYANTAPDPSEVAWPKHFDRIWRYLYPYLNNPEGAAKNSSSKYPYPDGYTTEPKPAPRAGGAEGGNPALWDVAFTVSVTVTNTGKRPGRAVAQLYAELPESLGVETPSRQLRQFGKTKTLAPGASETLRLGITRKDLSVWDTVVQDWKAPVNGEGVKIWIGESVLDMHGMCEMGGGCTAI

SEQ ID NO: 119 - protein, 500 aa, Clavibacter michiganensis
MTPRDTAPDRPTPTELAGLLAGGSRIGVSTSATKVEGRAHEGGRTESVWDAFARRPGAVADGSDPERGARHMERYREDVALATELGVDVLSFSLSWSRIQPEARGGLRREGIAFYDELVDALLAAGIRPRAALHDHDLPVELQDRGGWLHRDTALRFGDLAYLAAEALADRVPDWVTLRTPALTTMGGHVTGTHAPGSRLGLDALPTVHHQLLAHGLAVEAIRGSRSAARVGIVNAHRIVEAASADDDDRAAALVARALHQDLFADAVLLGRYPDLTGPHAEAFERLGRVDPADLRVIGQPLDHYGVALADPIRVAAVPRLVAGSTAIPFTELPWADHPSSLDGHPVAPDLVPAVLADLRARYGDALPPVVLSGLDAAHPEQVDDRDGSRRDPRRAHSISDHLVQALAAVAPGGQAEGVRIEAVVAGSLLDGFEWEAGRAAPRGLVHVDPRTGDRTPRSSYRFLRDTLRERADTAAGRRPQNGCAGPAYPGSSPGPRVGS

SEQ ID NO: 120 - protein, 840 aa, Penicillium rubens
MDSESVTKIITQLTLAEKVTLLSGIGACQTNSNDRLNIPSLHTSDGPHGLRGGGGRFFNPPPGYQLPSATAMGATFDTDLLYQVGKLLGDEGRRKNVQVALAPTVCIQRSPLVGRGFEAFGEDPVLSGSLAAQYVRGLQERGVASCIKHYAAHDQSSKSKEDDVHMTERSLREVHLLPFQIAMQARPWSVMSAYQKINGLHVSEDPLLLRQILRKEWGFDGLVISDWWGTYSTSEAINAGLDLEMPGPSIWRGRQLIEAVECRKVSMAAIDTAVENLLKLIDRTNSSRTRTSEVEGGDTPDSRALTRKVAADSIVLLKNTKNVLPLPAVGKASTTYGLIGEHFKNPATGGGGSSETTPFYVSRPLDAFAEVLSAENIRHESGCYTRRWSPLIHEGLYQPDSEEPGLLLEWFGVDPSIFTEVPCLYSTTTTNTCMYFSQITFPNVPDLHYIRVRTTFVAETTCKYRLGLGVCGKGRLFIDGKEAIDLWTNHPEKTDDTPCFNKLSMERFATLDIVEGQRYELLILMTNEKPGDNFGPPAAGGVRLGGQVVRDESKAIEDAVQLARTVDVPILITGLSTDCEYEASDRTSLLLPGRENEMIQKVSDANPNTVVIIQAGMPIEMPWIDSVNTLVYAWYGGQETGHAITDVLWGAVNPSGRLSLSFPRRIQDNPAFLNFGKTDREIVYGEGVFVGYRYYEKLETPPLFYFGYGLSYSQFNYSDLRVPSEYPKDGQMGIALDVTNAGEHDGAAVVQIYISDLECSVQRPRKELKAFRKVLVSKGETRTCHITLDKYALSFWSEEHSQWRVEAGEFEVIVATSADPEDEVSRAKFRLLKTFMWSGV

SEQ ID NO: 121 - protein, 444 aa, Unknown
  Lachnoclostridium sp.
MTFPDNFYWGAASAAYQVEGAYNEDGKGPGIWDALSEGHVKHRENGNVACDHYHRYKEDVALMKEMGLKAYRFSVSWPRIMPSEGVINEKGLEFYRNLVKELTDAGIEPMCTLFHWNLPMWLHEKGGWYCTKISDYFEKYTETVVEALSDKVSYWMTFNEPACFIGCGYVMGNHAPFEKCMDMEHPEEMAQKIALLSKNVLLSHGKAVQAIRRCAKKAPKIGMALNASLFTPENTSEESVEAARAATFSEQGAFWNLNWWADPMVKGEIPRAMKDVISGEEREIICQPLDFFGFNNYNTNDYDEYEGRNERAWPGMPRTAMDWPITPDALYWAVKFIYGRYGLPVLITENGMANLDFVMSDGKVHDPQRVEFLKVYLAGLKKAVGEGVPVIGYMYWSILDNFEWAEGYDKRFGLVYVDYRTQKRTRKDSSYWYAEVIANNGADL

SEQ ID NO: 122 - protein, 746 aa, Unknown
  Rhodobacteraceae bacterium
MDIKRKVGRLMADMTLAEKIGQLNLLAAGEGLVTGAAQHTPLAQRLDAGQVGAIFGTKSLASARAMQERALEGSRLKIPLFFAEDVIHGHRTVFPLPVALACSWDLDLIEETSAFAAAEASSEGLHQVYAPMIDISRDPRWGRVAESPGEDPLLASRIAAAATRGFQGAGIDTNGRVAACLKHFVAYGATESGRDYDNASLAWEDLLGIYLPPFTAGIAEGAASVMASFNAVNKLAMHAHEPLIEGWLRGTSGFDGLVVSDYTGVMELTGHGLGPSPVVVARALHAGVDMDMVGEDYLKELPALAARGVDMPDAGVAFSSDEIRALIDRSCERVLTFKARLGLLDDPFRGMADTTAPSRHDGRKLARRAAARSAVLLKNRGVLPLAEDTAVALIGPFAKDRRNMLGTWAVSGNSNDVVSLDAAVTALTGTVPRTAWGANIVAESWLEQRLNVHGVTVESDPRTEADLLLEALAEARQADVIIATVGEAKEAAGESSSLLSPDIPQAQHRLIAALKETGKPLVVVVFAGRPLALGDIPAQADALIYAWHGGVAGPEGVADVIFGAAEPSARLCVTLPASPGEVPLSYADERTGRPFEGHFMKFRTGWLDMPDGIERFPFGFGLGYGDVRYGTPSLSAATAVAGEKVMLRLDVENRGDRAAVETVQLYASDPVARITRPGRFMIDFKQITLNPGEKRDVVFEVEAGQFAYPVAPSLEAAEWVRDPGLIRLHVGPNSRDTHPVELTWLT

SEQ ID NO: 123 - protein, 722 aa, Bacteroides fragilis
MKDMQTKIVMIGILLSTGIMLRAQDNGGCEDCPAFNAGGKVEVRGVKERIIGDLSQPVAVRVRTLIQQMTLAEKVAQLVSESDSIPWLNLPAYNYWNECLHGVARAGEVTVFPQAINLASTWDTVLVKRVASAISTEARLKYLEIGKGLTYWSPTINMARDPRWGRNEETYGEDPHLTSRLGVAFVKGLQGDHPTYLKTVATIKHFVANNEENNRFSSSSQIPTKQLYEYYFPAYEACVKEANAQSVMTAYNAFNGVPPSGSHWLLDDVLRKEWGFDGFVVSDCGAIGVMNWQHRVVNSLEEAAALGVNSGCDLECGTTYKEKLVQAVEQGLISEAAIDRALTRVLTARFKLGEFDPMELVPYNHYDKKLLAGKKFAELAYEAAVKSVVLLKNDALLPLNKEKIKSVAVVGPFADYNYLGGYSGQPPYSVSLLKGVKELIGKKGKVTYLNGMGTSADSIAQVVKGADIVLVALGSDEKMARENHDMPSIYLPEGQEKLLKEIYQVNPRIVLVFHTGNPLTSEWADTHIPAIMQAWYPGQEAGRALANLLFGNENPSGKLPMTIYKTEEQLPDILDFDMWKGRTYRYMKGEPLYGFGHGLSYTSFEFDNIQGNDTLQPDAILQCSVELSNSGQLAGEEVVQVYVSRENTPVYTYPLKKLVAFKKVKLASGEKKKVDFTIAPRELSVWEDGKWRMLSGKYTLFIGSGQPGLAKGITKGFEVKIR

SEQ ID NO: 124 - protein, 849 aa, Aspergillus indologenus
MSDSQDLDKLLGKLTREEKISLLAAADWWRTQVIKRDDVFVPHVKFTDGPNGARGESYVSGIKAACFPCGTSLGATFDRELLFRTGKEIAREAQTKAANVLLAPTMNVIRSPRGGRNYETYSEDPFVLGALAAAFVNGCQSMGIAATPKHYVANETENSRTILTAEIDEQTLREIYMLPFQLLMRWAEPLCFMTRYATSYNRVNGAYVADDPRLVNQVLRGEWGFDGVVVSDWMGVYSTANSINAGVDLEMPGPTRWRGEKLARAVNDGQVAEQVVDESARRVLQLACRLKRFEHPEEPPEDAVENPERDDFICESGAEGMVLLKNENILPLPKGVTVALIGHHAMEASLGGGGSARVDSLHAVSPIEGLNQAGFQVKAVPGVSVFGSLPHADPSIMYSSDTKTQAKDPVKLEWFNGHVVGKNPVFSETKEQAEYMIKEKWPDHLNQDYCTRMTFDIRPLSSGDHILSIISTGPAVCYINGDKVFERPQETDLRPESFYFFKSKLERRFTYPMQAGHSYTLMLESWNTDPLILHAKLLFGRMFQGSALRFHEFIDIPSRIEDARAIAREVEYAIVCVGTTNEIESEGFDRESMNLPSLQYEQIAAVAAVNPRTIVVNFSGGPVGLTQFIDSVPAVVQAWFPGQEAGRSLARVLGGVTNPGGRLPFSWPRRDEDNPSFANFPCDENNVIRYAEGLNVGYRYYDRPESPESLFPFGFGLSYTNFKVFGVRITDTSISDPEGTVMVSCRVRNIGTRMGATVVQYYVSPPRDQVESQRPLKELKEFRKLSLQPGEEQDLSVTLDKYSVSSYNAQQHCWDVSEGRYEVHVGLSSAEISSTVGFHVGRGFSWCGL

SEQ ID NO: 125 - protein, 894 aa, Acaromyces ingoldii
MTQKAFDAGQVLTKLSLDDKIRLCSGADFWRTYSDASVGLPFYAKLTDGPNGARGGGDFNNSTPAALFPSPSCLGATFDVALARRMGEGIARDSRSKRCHVSLAPTINIQRDPRAGRFFESYSEDPVVSGEIGAAWVRGCQSVGVGATPKHFVGNEAETERMRSSSDVAPAALREVYLEPFKRIFRELARDHAQKREKGGARGGSEDVFGGQPACIMTAYNRLNGWSCSENEALQVGILRNEWGFKGLVMSDWFALHAHGLRATNLEMPGPSLHRRLDAVKQLLKEGKVTTEDIDRNAEAVLRLLKKVSPLGFSSSPDKEQEESIDDAAINTSIRQIAAEGAVLVKNDDNILPLDPNRVKKIALIGKPWTDAIQSGGGSANLTPQKVTAPLDCLRDTLSRDGHAHVELLHHFGTEIHRFPPNPSSHALEGKKVRLDFLKEGQPVTTTEVDLPFLDRSAPLPGEEKGEKVDFDTVKAQFQLKGSDAGTYRLGLIAFGTLKVQVVRDGKQTDEWDYQGERSFFDYVLNPARVWEPRLFEMGQDEAVTIQLEYSREAFSMPGISPEEAYAARAFGFRVGFERQIDDEAALKEASELAAKCDVAIIMTATGKEFESEGFDRDTLKLPRRQDDLVKAVAKVQKKTVVLNQTGSVVEMPWIDEVKGIIQAWFGGQETGWAICDVLLGHGRAPASGRFAQTWAKSLKDHPSGQHKDEFPGTHRAGDIEGPHVTYAEGRLVGYKWYDRRSVEPLFWFGQGLGGYTTFEASFANKQEGPLTLTRETGAVPIKIQIKNTGKRSGKYVVQVYVRRAMAADREEDEPNQKLAAFLAVQTGAGQTTVVDLKVEKEDVSSWDEAQKKWRVEAGQYDLILAKSADPRASIEEVPLQVDQGWVWEGIGDV

SEQ ID NO: 126 - protein, 544 aa, Monilinia fructigena
MIPNNFLSLQNVEDRTLHELYMWPFYNAIRSGVANVVCSYNRVNQSYACQNSKLLNGLLKTELGFQGFVVSDWMGTHAGVASANAGLDMTMPGAQWWDPMGPGVPSYYGANLTAAVNNGSVSLDRINDMALRVMTPYFFLGQDQDDFPLIDGYSGVYPAINHFNAPSFWEDLAWNSSMGASMSTFVETIASPKVIGIFGNAAGDITNGPYHHDQKYEYGCLPIGGGSGSARYSQLVTPLEAIKIRARKNGTNLQYILNNTQLAVPGSFSEMIYPEPDVCLVFVKAYSSEGEDRKSLALDWEGDAVVEQIAGNCSNTVVISQAAGITLMPWASHPNVTAILATHLSGDEIGNSLVDVLYGAYNPSGHLPYTIAYNESDYDFAPIVTSANSTAPGAWQADFKERLLIDYRHFDYYNISVLYEFGFGLSYTTFNLTSLNISPLYNDTLSCNPLPTPKQQDHPRWKPDLWTPVYSITTSVSNTGNFSGAAVPQLYITIPDTEGGTPVKQLRGFEKVGLDAGETKEVKFELMRRDIQYLGCGIARMADP

SEQ ID NO: 127 - protein, 824 aa, Paenibacillus xylanexedens
MIYKDASKSIHERTEDLIKRMTLKEKVAQLYCANSYGGESVYDSRMHKLKDGIGTVSYLNDSFTGDLKKDRETINGIQKYLVEETRLGIPGLFHSEGIAGAQIPSATTFPQSLNLASTWEPTLAQKMGEVVKKQLISFGFRAVHSPLFDLARDPRFGRVGETYGEDPYLVAQMGVSFVKGIQGDHEIMATAKHFVGYGNAEGGRGGGEQQISERRLLDSYCFPFEAAIHEAKIKAVMNSYGMLNDQAVSTSKWLLTDVLRNKLGFQGLVVADYGSITHAFLRYRVAEDAKGAGILAFKAGMDVEQPGNQCYQHLVEAVESGELEEAHIDVSLRRVLETKFTLGLFENPYEAGDFFYEIKKVENEELSLEIAEKSMVLVKNEDGILPLNKKLKIALIGPNSDTKTNFFGGYSSVGSASTKSSDFDKSEEDSFLRMLYTGTITDNKESLKSMGIEFDEKPTPEQKSIILNMIRQNLNSDDSSNRVYRTNEEFVQMFYPDCKSVKDVLEEEFGKDRVLHAKGCDIFKAIDGGIETVKAAVQQADIVIAVLGGKESMIDPEATCGENKDNINIGLEKPQLDLMEEVFKLNKPVISIVVDGRPLSTPYVSQQSKAVLYSWLPAQFGAKAIVNILTGKINPSGKLPVTIVKESGQIPMYSSRLPLYVDINEYAEYIKTNQNTPLYPFGHGLSYTQFEYSELVQNASVQADGDLSIAFKLKNTGQVAGEEVVQVYIRDQVSSVARPVKQLVGFARVTLDVNETKIVQFKVSMKQLAFHDLNMDQIVEPGKMEMYIGASSQDIRLKGVFAIIGEKLIVERKVFSSKVTITEL

SEQ ID NO: 128 - protein, 750 aa, Actinomyces howellii
MTTAPADQLTDAQKNRIEEILASLSWEEKLNQAQITFKMSQEECLAAARGGIGALFWPGDAARTNAVQRAAVEESAHGIPLLIGLDVIHGQRTIFPTPLAMAASFTTAVARSCAEVSAAEARSGGVTWTFSPMVDVSRDPRWGRVAEGFGEDPLLTGAMGAAMVAGYQRERLDEPGTLVATAKHFIGYGAAEGGRDYNTVDMSAQRLRSVYLPPFADCVEAGVGSVMASFNTVNGRPVHANHRLLTDLLKNELGLTGAVVGDASGVENLIPHGVAADMEQAARMSLVAGLDVEMGGHLHDPAARPKAPALLSDDDPVLVARVDDAVRRVLTLKMALGLFDHPYVDEASEITSPAPELLAAARSAAELCPVLLTNDGALPIAPTTRRILLAGPAATSTDHLGAWVQHVAAAPERSLAQTLPVALAAAASAVGVPAPELTVLGGQDPLGVTAEQVDAVASAAGEADLVVLALEEPSQLTGEATSRADLRLPGGQEALIHAAVATGAPVVVVLVNGRPLVVEDWIEEPAAVLEAWHLGTLGPEVIADILTGAVNPSGRLPMGWPRSVGQLPAAYDAHERTGRPATVGGTMIRPAFDMGLDGPANLQEFFTSKYRDLELGPRFRLGHGLSYSTFSYRDASLSRSEISAAELADGAGVEVRVTVAHEAGPKGEEVVLLFVRDVVASLAPAVRRMAGFRRVAVPAGGEAAVSLRLTERSLALWDDDGAGWRVEPGEFEIRLGPDPQAEPLRLTVTR

SEQ ID NO: 129 - protein, 514 aa, Friedmanniomyces endolithicus
MEKNVMSCVKHFIANEQETNRIPPALIPGALNQSLSSNIDPKTEHELYIWPFQDAIRAGAASVMCAYARFNNSYGCQNSYSMNGVLKTELGFEGFVVSDWGAQRAGLASANSGLDMAMPGSSYWQNGNLSKAVSNGSLTKSRLDDMATRILSTWYRLEELNSPAFQNPGFGLPASTTGPGVALNGTMITGGGSGSITPAYIDAPYDAFQRQAYQDRTLLAWNFVDLDVTVDQASEHCIVFINAQSSEGWDRPDLADAGSDRLVENVASQCNSTIVVLHHAGVRLVDRWIDNPNITAVIFGHLPGQDSGRALIEIMYGKQSPSGRLPYTVAKRDADYGNLLGPVLPVGVDYYTQDNFTEGVYIDYKHFIAQNITPRYEFGFGLTYSTFDYASIGVSQGYANTQYLAPNTTVAEGGLTSLWDTIATVTFDVCNVGSVAAAEVAQLYVGIPGGPQKVLRGFGKQLLQPGETGHFSLALNRRDLSTWTAQGWVLQKGTYQLYVGKSVLDIQLTSSLTI

SEQ ID NO: 130 - protein, 884 aa, Neosartorya fischeri
MQVKSESSVPEMGDLQTMNAAVDEVTDSSRAGTPTSQDESTREDAARSVQPNFTSLLPQLTLEEKVDLLSGTDFVHSSGVSRLNIPPLKLVDSVNGVKGSELHHGVPTAIFPSSTLYGATWNNTLMEELGRALAYQAKLKSAQVILGPTINIHRDPRGGRNFECISEDPLLSGQLAAGVVRGIQSQGVAACPKHFACNESEFKRREYSVAQSHNSRAVREIYLAAFQEMLRRSEPHGLMVSYNKLNGTHTTEHPFLKEILRDEWAYNGCLVSDWFATKSCAASINAGLDLEMPGPSVFRGPKLVAAVRDGLVDEKAVDECVSRVLALVEKTRESHSQEPERSEVSPETNALALKIASEGIVLLKNEQGVLPLDMRRAPKIAVIGVPASEPVVSGGGSASAPPQYLQKPLDYLRDAHPFPSLVKYARGVNTNRIVPIVPLDCTTSKNGSPGFDVAYFNEGSNMPVCTEHQKTPVVAMVRNLKPGLMEPGFSYEISTTITPKTTGPHTLAARVTGSFSLFVESKAVLSVPNQHEVTMEDFLFEPARLEHRISVFMEAGKPYLVRLLSRARIPRENDYEPTPHGATLCYEEFSDERALIAEAVQVASSADVSIIFAGRNQQYESEGFDLDSMNISEPQVRLIRAVTAVSKKTVLVLNCGNPIDLSPFVNEVDAILNAHFPGQEGGQAIANILTGKTNPSGRLATTWPKKFDEEHVPTYHNFPARLTERGYEIKYEEGLQIGYRHPQSQRTAQWQFGHGLSYTTFEYSGLTVSGQEITEEAGDSDLKISVRVKNTGIYPGHEVVQLYISPPDSTKVWRPARALKGYAKVWILPGESETVTISLNKKHAFSYWDEDVKQWRLEPGTYRLLVGPFSTPFEIEHSLMWAGR

SEQ ID NO: 131 - protein, 443 aa, Pseudomonas aeruginosa
MTPSPAPFNPGFIWGVAASAAQTESRNGRGRSNWDLFCDERGGVLDGSTNALCTGFEERYPQDLALLADAGVQAFRFSIAWPRVQPNGPGPASAAGLEVYERMVDAMLERGLTPWPTLFHWDVPTWAGDFRDRDICQRFADYAEVVADRLGDRIDQWIVLNEPNSVALRGYAAQVHAPALDSASAAFAAIHHQNLAQGLAFQALRASLPGRPRIGTTVNLQPVRAEHGQRYDTQVHLVDALWNRAFVDPLYGKGYPAPVDRLVAPLVREGDMQLIAVKPDFLGLNYYSRIYVRPDSGGSLGVAQGEAPAQLPRTDYFHVEPDGLTEMLLRLHRDYDAPELYITETGFAVPDPAPRDGVVEDHQRIGYLASYLKAAQAAQAEGARLKGLFYWSATDNWEWAQGFAKRFGLIHVDRNDLSRTPKRSLHYFAECIRANAALDAPKH

SEQ ID NO: 132 - protein, 835 aa, Talaromyces stipitatus
MAIPDFDVDSILQQLTLPEKISLVSGRDFWHTTSVPRLKIPAIRLSDGATGVRGIKFFNGTPAACLPCGTALGATWDPELIEKGGALQAREGILKGASVVLGPTTNIQRSPLGGRGFESFSEDPFLAGTLAAATIKGLQSNGVAASLKHFACNDQEDHRMSVNAIVTERALREIYLMPFQVVQQIYPPWTYMASYNKVNGVHSTENIHLLKEVLREEWGFDGLVMSDWFATYSADKAILAGLDLEMPGPSYARGAALRHSILPGKVKEYELDACVRQVLRLIKRVLPLGIEEDAEERTDSNPDTSKLLRSIAAESIVLLKNENAVLPFCPDKFTAVIGPNADFAAFSGGGSTMMTPYYTVSPLEGIMSECKQVGYSLGCGGWNKLPALSRLTKTKSGLQGLTMAVHLEPSTREKRELLEVIHVSDSVMDFCDYKHKSMGDDYLFYADFRGTLIPEESANYQFSCSVLGTARVFVDDQLLIDNATNQVRGDTFFATGTREEFNTIFLEKGRAYEIYVDFGSIATYTLEVASTAPFGGGGLRLGCTRVFDPQGEIQKAVALAKAAEQVVLCIGLNGEWESEGFDRDNMDLPGYTDELVRAVAQVNPNTAVIVQSGTPVTMPWVDQVPAILQAWYGGNETGNGIADVIFGKKNPAAKLPLSFPSRLEDNPSFINFGNQGGRVLYGEDVFVGYRYYEKSKTPVAFPFGHGLSYTSFHFETLQVKNDGESFLISVDVANTGVADGAQVIQVYVAHIDPLIPRPLKELKGFKKVFIPVGESRVVDIRVSVRHATSFWDEDRNMWLSAKGDYQLLVGDSSANTPLCHQVTVEENSWWKGLCN

SEQ ID NO: 133 - protein, 754 aa, Aquimixticola soesokkakensis
MTDSTATPPDPIAAKLTFARGRDYWTTQAAPEIGLRALRFADGPHGLRVQDDENPDHLGLERSAPATCFPPAVTLASSWDAALIEEVGAALGREARAAGVDVVLGPGLNLKRSPLCGRNFEYYSEDPMLSGLLAGASARGIQSVGVGACLKHFAANSQEGDRNRISADIDERSLRELYLRNFQLALEASGAWSIMTSYNRINGLHASQDPWLLTQVLREEWGFDGLVISDWGGVYDPVAALKAGMDLRMPGGALDDRLIAAHARGEIAEGDLDRVIANTTRLAERTRPRDTDVPPDVEAHHALVRRAAAESSVLLKNDGVLPLDPARYPKVAILGELARTPRIQGSGSSRVHPRRVVAPLDVLRERLAQSGAQVAFAPAYGLQNGPADAALITEALQVARDADIVLLFSGLTDAAEAEGSDRTHIDLPDQQLTLLAALADCDTPLVVSLANGAVVRSTQWRDTAQAIVEFWLSGQAHGETVADVLLGDVPPAGRLAQTIPRRLQDTPAFLDFPGEHRHVRHSEGLHIGYRWYDARDLAVDYPFGHGLSYTSFDYEELEIDVRASDDDIAFVARLTLRNSGARAGSEVVQLYASDPSTAYQTPPRELRGWQKVHLEAGESCAVSIPVKRAHLGHWHSGLKRWVFAGGPMTLHVGASSRDLRLTCETELHGEALPVVLTPWSLFGEWMQHPVMGPRIEALFASRGGVKGRAGDLLSDPAGRNTVYINPLAMLAQFPGVPLDQSDLETLCAEAAALA

SEQ ID NO: 134 - protein, 449 aa, Unknown
  Rhodobacterales bacterium
MNDLEIIRDFPEEFIFGTATSSYQIEGSMHGGCGLSHWDTFAKKENATFKGQDGSRACEHIFRWKEDLDLVRDAGFSAYRFSFSWPRIQPDGIGKVNTKGISFYDELIDGMLQRNLLPFATLYHWDLPERLADKGGWQIKDTAERFGDYSEIITKHFGDRLYSTATINEPWCISWLSHYWGEHAPGLKSLEATAKSMHNILLAHGKSIEVMRSLGQNNLGIVLNKTHVQPVSQSDEHIIAANLFDDIHNLWFDEAIFKGRYPQKLLSIFEPHMPENYQNDMGIISQNLDWLGVNYYTRSIVKSDESEPNFKFSLVEGDLPKTDMGWEIFPNGLSNVLRRLNSDYSKNKPIHITESGMANSDRMIKNNVDDNERISFYSAHLKEIETLSREIPIKSYFAWSLLDNYEWAFGYQKRFGLVYVDYDDLKRIPKSSYKAFQKALLSRHKGMNN

SEQ ID NO: 135 - protein, 743 aa, Methylorubrum extorquens
MRRLARWIIRGAAAWAVVLGAPASAVEPVESRIEALLARMTLEEKAGQLNLISHEPILDLESFRRGEVGAVINFNNAGLVAQADRLARASRLGIPLLVGLDIVHGYRTIFPLPLAMAASFDAGLVRRAAAAQARESAMVGLNWTFSPMADVARDLRWGRVVEGLGEDPWLTGRLTAAQVEGFRDGGLASTLKHFAGYSAVLGGRDYDATFVAPTELHDLHLPPFRDGIRAGADAVMTALTALNGLPATADPALMTGLLRRQMGFSGLVVADWQAIASLMKHGVAHDGAEAARKALAAGVDMDMTSGLFLRHLPAEVRAGRVPEGLVDAAVRRVLRLKFGLGLFDRPVVDPDGAEEKLLRPETRRLAREAARASLVLLQNREDLLPIAPAKVRRIAVVGPFADSAWDQVGPHEGTGQEWDAVTILAGLRERAAAAGVAIDFAPGCSRVCDSRAGFAAAVEAAAGADLVVAVMGEPRDRSGEGSSSATLSWPGLQHDLLAAVAEAGKPVALVVVGGRPTELGDALGQAQAVLMAWLPGTEGGPAVAETLFGDANPSGRLPVSWPRTVGQLPLTYDTLPGGRPHIPGTRWTMGYADESPLPLFPFGYGLSYTRFAYGEPEIVTPHVGVGDRYDAMLEVRASVTNYGTRPGRAVAQLYVGQPVASRSRPRRLLKGVALLDLASGETGVASFRVPARVLGYHEPDGTLVVEAGTYLAHVGGDAIATRSAGFTVETGWRGPPGSDEARR

SEQ ID NO: 136 - protein, 589 aa, Clostridium perfringens
MVNLKVKPYNLDEESIKWVEDTIKNMSIEEKIGQLFVNMGASRDEEYLKSVLNNYHIGAVRYNPGKAEEVYEQNRILQENSKIPLLIAANTEAGGNGACTDGTYVGNEVKIAATQDPHYAYELGRISGIEASAIGCNWSFAPIVDINRNWRNPIISTRTWSADADQTLELSLEYMRGIMESGILPAAKHFPGDGIDERDQHLSFAPNTLSVEEWNATFGKVYSGLIEAGLPSIMAGHIALPEYVKYFNPDATIKEMNMPATLSKYILTDLLKGQMGFNGLVVTDASHMVAMTSAMKRKDMLPTAIAAGSDLFLFFNDPDEDFQWMMEGYKNGVITEERLHDALTRILGLKASLGLHKKAKTEILQPKEEAMAKIGLEENKKAALEIADKAITLVKNNEEIFPISPDKTKRVLLVKVKGFDGGFGKFLALMQGAQKGPVDIMKELLEQEGFQVEIYESPVDKIMKLPKEEMGAAIGNIYAGKRPIAELTSKYDLIINLADVGASVDQRLQWPPSKGTPDIPFYVNEIPTIFISLQCPFHLADVPQVKTYINAYDSKEFNIKALVDKMMGRSEFKGVSSVDAFCGLKDTRY

SEQ ID NO: 137 - protein, 440 aa, Unknown
  Acholeplasmatales bacterium
MTKRLFPDGFAFGAATSAYQIEGAFDEDGRGKTAWDLRNRDEHGRPTGPVGDVACDHYHRYREDIALMQELGLQTYRFSISWVRIFPDGIGRINDLGVAFYDALIDALLAAGIRPAVTIWHGDLPLALESAGGWENRATIDAYLDYARFLFDHYGDRVKTWYTHNEPWCAAFLNDGPLARQLTIAHHLLIAHAAAVQCYRRSKYADGKIGIVLNLSPQYPASADPADVAAARSVDGFLNRWFLDPVLKGRYPADMVERYAGFGAGAPIRPGDMETLRSNPSDFLGINVYSRGVQKADSDNAFLGSKDRPDPNSVFTEMGWEVAPESLYDLLMDLEASYGVEIQITENGAAFKDSIVRDGVVQDDDRLAYYKGNLLSVARAIRHGCRVTAYYAWSLFDNFEWGTYEMKFGIVHIDPVSQKRTVKKSGLFYRDVIAARGLDA

SEQ ID NO: 138 - protein, 452 aa, Unknown
  Bacteroidetes bacterium
MHRPFIYGVATSSYQIEGGIGEHGAGTSNWTVFSQKPGNISNFENGNIACDHYHLWADDIDLMHEMGIQSYRFSISWSRIFPDNSGKVNEEGLLYYERILHKLQSLNIEPMITLYHWDLPQWLEERGGWSNPDIIEHFCTYSLTVFKRFNKFCDKWITLNEPWVFLHKGYITGEHAPGIEDLSTAGRSYVNILRSHVLAASKMRSEAPHIEIGIACNVSYIEPATSNNADIVAASTFESYINSLFLDPWIRGSIPTVAWTLFKKDLPDKWLSDASELITQHDFVGLNYYSKTTIKSNQSVFLGAEITTSGLPETSMGWEIYPDGLTWILKWAFDTYKLPIYITENGAAFHDELLPSGDIDDVDRIDYFKSHLDSMQNAIKSGIPVLGYYAWSFLDNFEWEAGYEKRFGIVYVDFKTLQRTMKKSGEFYRDYIKNHNRLMVNFSQKSTIQLSQ

SEQ ID NO: 139 - protein, 707 aa, Clostridium carnis
MSEKKIEEIISMLTLEEKIAMIHGNGLFRTEGVKRFNIPPLKMSDGPIGVRNEFPDDSWIPIGNSDDYVTYLPCSLALACTWNTELAYKSGQVLGCEARGRGKDVILGPGINIIRSPLCGRNFEYMSEDPYVSGKMAVPFIKGVQENDVSVCVKHFAVNNQETERLNVEAILDERTFREIYLPAFEMAVKEGNAYSIMCAYNKIFGYHCSNNRALLTELLKEEWEFDGIVISDWSAVNNTEFAANAGMDIEMSVTTNFDEYFFANPLIKAVKEGKIKEEVIDEKIRRILRFMYKINIFSEDRKNGTYNLSEHRQVTLDVARESIVLLKNEDNVLPLEDKKIKKLAVIGENANFTHSNGGGSAEIKALYEITPLLGLKMRLGGNTEVKYAKGYSQDPSAKDKLIEEAVELAKSSDEVIIVGGLKHVEDQLKLENNALSVDEDEVVKHRIDSEGYDKSDLILPYDQDELIKRILEVNKNAVIVMLTGSPVDMSEWADEAKAIVQTWYNGMEGGRALAEVIFGDVNPSGKLTVTFPRKLEDSPAHKLGEFPGKETVNYGEGIYVGYRYFETYDINPLFCFGHGLSYTDFKYMDFKITTNEKDNDVEILVNFKITNKGKKAGKEIAQIYISDLEASVERPAIELKAFEKISLKAGETKEVEIKLNKKSLGFYDVNNKKWKVENGAFNILVGSSSKDIRLNSKVNIDSDYEF

SEQ ID NO: 140 - protein, 803 aa, Mycolicibacterium flavescens
MTDPMTRAHGLLRQMTVDEKAMQLSSVFPLALFTPEGINRSRLDALLGNGIGHVCALGLIGHKAPEVLAKATNAIQRYLVTETRLKIPAIFHNEAMSGVVAPGFTAFPTPIAMAATWDTEAVEEMTGLIRRQLRSVGLRHALGPVMDIARDARWGRISETFGEDAYLVSAMSVAYTRGLQSHDLVRGVAATGKHFIGYAVTEGGQNMAATAIGARELYDVYARPFEAAIRLAGLASVMPSYSEFDGVPVSASHAVLTALLRDKLGFTGTTISDYVAVGFLQTRQRVAETAEDAGVLALMAGMDVETPEVFGYGEVLANAVRNGRVAESVLDRSVLRVLRDKFALGLFDDPYVAEDPIVIDTVAREGADLSAGLAGRAVTLLKNDGDLLPLSRDLGRVAVIGPHADDVAAGFSTYTFADAVKMFEVRATGGEIAMAGMELGGEVPHEALMAIASELGPVFATDRRAYIESNYSAVSLADAVRELLPHAEVLAVAGTGVTPTEPVDIGAAIAAAGDADAVILAVGGRSSWSGQRTEGEGSDTADIALPAQQVALIEAVSTLGKPTVTVLSMGRPYALDGLIDELPAVLTAYYAGPYQATAIADAIFGITNPAGKLPFTMPRHVGQVPIHHAQKTGSGYRRTDADPHSGYLDMAATPLFGFGHGLSYTTFAYGPLELASDTVDAGGAVTAAVAITNSGQRRGSDVVQLYAADTATGVTLPAQQLVGFTRVDLEPGASKSVTFTLPLSVLAYTGVSGELVVEPGPVELSVGTSSTDIRARATVTVTGGTRTFRGDERAFFSSVAVGA

SEQ ID NO: 141 - protein, 564 aa, Streptococcus gallolyticus
MIDLTTKPFNLSQNEIDYVLEQVKQMTTSEKIGQLFFVIGQDEKMVDLDEFIDKYKPGGMMFRPAPAADIKRQIKQIQNHSKYPLFFAANLESGGNGIISEGTWLGMPMQMAATDNTDAAFQLGNVAGYEANQVGCNMSFAPIVDIDNNFRNPITNTRTYGSDPKRVLKMAQAQRKGLEENHVIPVIKHFPGDGVDERDQHLLSSINSLSAEDWSSTYGHIYKTFIDQGISTIMIGHIYQPAWERKLQKGIADKDLRPASASKLLINGLLRKELGFNGLAMTDATAMVGYNVILPRKELLPATINAGVDMILFNKNIDEDYKAITEAVETGLISEERLNEAVTRILATKVAQNILTTDGKLGIDIPETLDLKSDEHLTIAENIAKQSVTLVKDRDQLLPISPEKTPRVRLVVLGDSDDGGFKEGGKVSDLFKEELEKAGFEVTPFQMDFHEMFEEGVCDLKEKFDLAFYVANVETASNQTTTRLDWIHLMAANAPWFAKAIPTVFVSTANPYHLFDVPYLSTYINAYTGNTANVKAIIRKMTCQEAFEGINPVDPTCGDFNAAL

SEQ ID NO: 142 - protein, 451 aa, Yersinia enterocolitica
MAIHKKDLKREEYEKHYKISNQQIADAIAAKDASDYPKRRGIDFYHRYKHDMALFAEMNFKVLRVSIAWTRIYPNGIEEQPNEEGLRFYDELFDEMHKNGIEPLVTLSHYEMPIYLVNNYGGWSSRKTVDLFEKFSTTVLERYQHKVKYWLTFNEIDSLIRHPFTSGGIVTERLPADEIESVIYQALHHQFVASALAVKHCKRISPDAKIGCMLTRLLTYPESCAPEDVLLAYQENQLNYFFSDVQIRGRYPRHMTRRFAEKGINIVMQPGDEEILQQHTVDFLSFSYYMSLVTSVNADKMDKVGGNIAGGVKNPYLKTTDWDWQIDPVGLRIALNDMYDRYQIPLFVVENGMGAVDKIDKDNQINDDYRIEFFRSHLKEMKEAVKDGVELMGYTSWAPIDLISASTSEMNKRYGFIYVDQDNDGNGTLDRYRKKSFYWYQKVIETNGEYL

SEQ ID NO: 143 - protein, 829 aa, Unknown
  Anaeromyxobacter sp.
MWSELRAVTVVGLLSLGVSCGRSVDAESGAQQSGLPWMNTSLTAEQRADLLIPQMTLEQKVQQISNDTRPAEKDENRPPGCEFTQIARHIQGIPELAIPTVRMINGGTGVRGGSCLPEPVATAVPSTPASAATFNPELNRQLGEVLGAEARSVGHQVMLAPGMNLHRHPFGGRNYEYQSEDPYLSGVMATEQIKGIQAHGIHANAKHFAANEQESQRRQMATVVPPRALHELYLLPFEMSVRDAQPASIMCAFPEINGVSACSNEDLLKTTLRERWGFQGYVMSDRRAVHDVAPSIKAGVDWELSHITPLHYSLEPQRGQRGNPGSEGIRAALDAGTITVGDIDQMLRRRYVQMFKFGHFDTDFDALYGSPVDFVAHAAVARELAEQGIVLLKNEQGFLPLEPKEIRSIALIGAEWFAGQAKLPPRSIRADNVGVVAPFTVSPQEGLEHVLITLGSPATVTYDSAGGTGKKEDRERAIELARKSDVVIVMVGDNPHELCDRETLSLPVIPPADPNFCAYDELEEGEYVLQRPERGEGTQQEMLMAELSADPEVAKKTVVVLKTEGMVLMPWLDKVPALVEAWYPGQSDGLAVANILFGLRNPSGKLPMTFGNSEREAAHETTAQFPGLWVGPPHWLATPSNSNEPGGDPSPTLEGQKRFSAQYSEGLQVGYRWYEANNVKPVFPFGFGLSYTTFAYADLSVQTVAGPQGQNVLNVSYRITNTGTRQGAEASQVYLTLPPEAGQPSKRLVGFQKVDLMPGESRQVTVTVDESAANHPLSYWVPEKDVPEPGWGRGEWRTAPGSYTVHVGTSSAETPLQQAVSVAAGVPRR

SEQ ID NO: 144 - protein, 623 aa, Talaromyces stipitatus
MQSQKVQTCGKHYIGNEQETQRNPTTYPNGTTKQESVSSNIDDRTIHELYLWPFYEGVKAGMASVMCSYNRINGTYACQNSKTLNGILKEELGFQGYVVSDWGGTHSGLDSALAGLDMDMPGAIEWGSDSGNNSYFGNNITMMIQNGSLAESRLDDMVKRILTPYYFFDQENYPTIDLDTAQLSKELYGSDIPSFSHPFNLGNSTDINRDVRGNHKDLIREIGSASAVLLKNTNNTLPLPKDIKRISVFGNDAADVSGGPYDPSNTNGVLSMGGGSGAGRLTHLVAPLEAIKQNNPQALIQYVTDNALLTQQPSETLYTVYPAADACLVFLKSFATEGADRLSFLADDNSTAVVDLVTGSGTCPNTVVILHSAGANLMPWADNENVTAIIAAHLPGEQAGNAIVDVLFGQVNPSGKLPYTIAYNESDYNAPVVNFTNVDNNDPNLWQSNFTEGLLIDYRHFDYNNITPRYEFGFGLSYTNFSISDLQIRSASNGNVSPTPQALNGTIPPPGGNPDLYTVLASVQVTVSNTGDMPGRAVPQIYLGFPDSTNTSSPTPVKVLRGFDRTKILQTSQSVTMSFDLRRMDVSSWDTGRQEWVIPAGEFMVLAGWSSRDLPLRGELQLV

SEQ ID NO: 145 - protein, 674 aa, Hortaea werneckii
MCLQDNENGVRGTDQSSGFPSQLSIGASWNRSLALERAQFLGREFKASGANVVLGPVGGPIGRIARGGGIGRAIGFSNDPYLSGQLIAPTVTGIQESVIACVKHWLFNEQETNRNPFAFGFLGYFGNQAVSSNVDDRTTHELYMWPFQDALAAGAGSVMCSYQRANNSYGCQNSKLMNGLLKGELGFQGFVVSDWYAVHTGIAANEAGLDMVMPSSSFLTPESLAEAVNNGSVSAERLTDQATRILAAWYRFAELEEPGLNQHEETNAQAEDVESTLLQGAIEGHVLVKNTEGALPLDPSSTHTLNLFGYDAIGGLNTSAEGFLLYDMGLANTQKYEDGRIFTFIDYYLQAGDILPDPHAGPQIALDGTILSGGGSGAVKVAWSISAHDALASRARTWNQTLHTQFVDQKPTVKAPDAPCIVMINAQSSEGWDRSGIRDEYSDTLVQNVASQCKNTIVVIHNAGVRLVDSWIENPNVTAVIFAHVPGQMNGEALAAILYGEQSPSGRLPYTHFIQQDITPRFPFGYGLTYTNFTYSNLSIRLAEGATTSPLPPAFQPSNPNTTTTLPQGGNPSLFDHLATISVQITNSGSVTAAEVAQLYIEVASSDLPLALRGFEKKLLSPGETETFSFPLRRKDLSVWDVGQQEWVLSKGPHGVRVGKSVGEILVEGTLELN

SEQ ID NO: 146 - protein, 438 aa, Unknown
  Micavibrio sp.
MVKKSDFSDKFIWGSAIAAYQTEGAHDKDGKGESIWDRFCQQEGVICDGTDGKVACDSYHLYETDIRLMAEMGLKNFRFSICWPRIIPDGTGEVNEKGIDFYSRYIDTLLANGIEPWVTLYHWDLPQALQDKGGWENPECVEWFKYYCQVFHDHFGDRVKNIVIFNEPSISSFFGYGTGFHAPGIKSEQAYLRAAHNINRTIHDAYFFLKSLKADYHLGASYTTPLIKTAFDDQKAVEIFDSLWNRNYLDPVMTGEYPDVFKDAFKEANPDTIGAELKTPLDFIGFQYYSPIYTKATKENDEYSFFGVWFSETPDTFDKTSMGWGISPESLEEFINDFHARYGKEMPIIVTENGCAYEDKVTDGKVNDDLRIDYVEKHLEIFAKYSDTVKGYFYWSLLDNFEWADGYGPRFGLIHVDYESLVRTPKKSYFWYRDLISE

SEQ ID NO: 147 - protein, 880 aa, Unknown
  Acidobacteriia bacterium
MKSRIRIGLQVAFILALILVRAVAQTPGSAVYLDPSQPINVRVDDLIKRMTVEQKATQLVNQARAIPDLKVPAYDWWSEALHGVANAGTATVFPEPVGLAATFDDSLIHDMAIVIGTEARAKHNQAVRAGRRDIMEGLDFWSPNINIFRDPRWGRGQETYGEDPFLTGRMGVAFVTGLQGDDPKYFRVISTPKHFAVHSGPETSRHTIDVQISKHDMEDTYLPAFRAAVIEGKAESVMCAYNRVNGQPACANTFLLKDQLRGAWKFNGYVVSDCDAIVDVFEGHKFVKSQAEAAAVSLKTGMDNECADFFTITKDDHDYKPYVDAVKQGLLTEADLDVALRRLFTARMRLGMFDPPEMVPYAQTPDSEIDSAPHRELALKIARESMVLLKDDGVLPFAASVKKILVVGPLADQTGVLHGNYSGTASHAVTAVEGIRKQFGGAQVSFEAGTNFLREHPVIPTSALSTDDGKPGLRGEYFSGELSGTPQVVRVDPYVDLQLSHPDAHALPLPTGMKDFSVRWTGFLTPAESGTYQVGLMGSMQRLWLDGKLIVDDGILHDPNPQLATVQLAKGHLYAIKIEYQAGGRTTKLIWMSTSADPLVEAVSAARQADVVVAVVGITSKLEGEEMKVDVPGFKGGDRTSLNLPAEEEALLGALKGAGKPLVVVLMNGSALAVNWANDHANAILEAWYSGEEGGTAIAQTLAGANNPGGRLPVTFYKGVEQLPEFEDYAMKNRTYRYFTGEPLYPFGYGLTYTSFEYSGMKLSNPQLQAGNPLDVEVDVKNTGKRDGEEVAELYISFPKLPGAPWRALRGFTRVHVKAGEQKHVKLTLSPRDLSYVNEAGDRLVSTGDYLITVGGGQPGTGAPHAESHLMIQGEQKLPE

SEQ ID NO: 148 - protein, 408 aa, Corynebacterium jeikeium
MDLSNIRIGTASAGLQIEGSPRPNNWSDWVAKDGTTPHPTTDHWHRWQEDNQLMSDLGLQIARVGVEWSRVEPEPGRYDHDALQRYREEFLDLRERGIEPLVTLHHFGHPAWFEANGAFTREANVEIFLRYVDVVLDHLGDVVRDWITINEPNVFATEAYLFGSTPPGRGGLPKVRPCLRNMAAAHLLAYQRIHSRLDNPRVTFAHHRRVFAPMNPRNPVHRLLTPLVEWLFQGAIEPAFFEGRFHPVLGRPSLDLPSGEVFADAVAINYYSRTAVRGFFDATFPGTPTNDLGWEIYPPGIAEVSADLAKRYQLPVWITENGTADADERFRCAFILDHLAELSRLPEVKRYYHWCFVDNWEWSEGMAQKFGVVDVNRQVKPAGRLLQALIREGAITPEIDAEFREKGH

SEQ ID NO: 149 - protein, 471 aa, Unknown
  Clostridiaceae bacterium
MYRFPDSFLWGSATASYQAEGAYLEDGKGLSIWDVFTHSEESKSKNVCNGDVASDHYHRYKEDIKYMAECGQKSYRFSISWPRILPNGRGKINPKGIEFYSNLIDELLKNNIEPFVTIYHWDLPQALQDIGGWENRETSYAFKDFAKILFQKLGHKVKLWVTFNEPRFFTYSGYLIGNYPPSYKDPQKTIRAAYNVMLANALAIKEFRSMNIDGQIGIVHSFTPVYSVDDSEGSRIAARNADNYFNNWVLDTAINGEFPQDLIQKLSKDYDLSFIDNTDLNIIKSNTVDFVGLNYYARALVKEYTTGETVLRVNNKGNKMKGSSKIVIKNWFEMIQDPKSKFTDWDTEIYPRGLYDGLKMVDKRYNHIPIYISENGLGMIDNLVDGRINDDPRIEFLKMHLKEIYNAISDGVDVRGYYVWSSFDLYSWINGYDKRYGLIYVDYKNNNKRIPKKSYYWYKDVIASHGLTLNE

SEQ ID NO: 150 - protein, 450 aa, Unknown
  Anaerolineaceae bacterium
MSQINFPNDFIWGAATASYQIEGAWDEDGKGESIWDRFSHQPYHIFNGDTGDIACDHYHQMPQDVALMKELGLASYRFSINWPRILPGGIGRVEPRGLDFYDRLVDELLEAGIKPMATLNHWDFPQALEDKGGWTNRDSVDWFTDYARILFERLGDRVPYWATHNEPFVIAMMGYAFGVFAPGIASYPQAFQVTHHLHMAHGKTVQLYRQMGLTGQIGIVLNLSTYQPKTNRPEDLDAAKRMEDMNNNLYLDPIFKGKYPEDLIAWIDKSRPEIRDGDMTLISQPIDFLGINYYTAQIVSFSPNGYMKFEAQTRVEPGWGITYKGWGICPSQLKSLLLHLKEDYGNPPMYITENGTTLNEPVDETGYVNDQGRINYLRAHFQAAHQAIQEGANLKGYFIWSLMDNFEWASGYDQRFGLLNVDFNDPARKRTPKASFYWYRDVIKTNGFTN

SEQ ID NO: 151 - protein, 762 aa, Gymnopilus dilepis
MSKSFLEAHVPDLVKKLKVEEKVALLSAPNWWNTTPVVRLGIPSIRMSDGPNGVRGSSHFVPTPAQCMPCATALASTFDPGLVKRVGDFLAQEAKLKSSVILLAPTCNIQRSPLGGRAFESFSEDPHLSGTLAAAYVDGLQSQGVAATIKHFVANDQEDERTAADSIMSARALREIYLYPFMLAQKHAQPAAFMTSYGRLNGTHCSENRELLTDILRKEWNFGGIVMSDWFGTYGVDLAVNAGLDLEMPGPPRWRTLSLVLHCLSSKKLTMATIDERVTSLLTFIQRQARKNIDIVFGDGIERSRDTPESRRFCRQIAAEGVVLLKNRGNILPLTCKNIAVIGPNVKERVISGGGSAALKPTYAVTPWEGIADGAPAGTTIHYHIGCYGHKYLPTLESNLRTPRGDAGWLCTFFAHDEHGEISYPVQQFILNDTRVKLNDFLPQGLTPTWSIKLEGKLTLDKTCRFEFGLTVAGRAKLWVDGSLLIDNWSKQIPGDFFYGQGTIEEKASVNVKAGKPVDIFVLYTNTPPPDGDDENGEGRLSQPALMRGVRLGGCEKIDEEDAIAEAVSLALQADAVILVGGLSPEWESEGFDRPSLRLPGRQDELFTRVANANPNTIVCIQAGSAVSMPWVKEVSGLLQAWYSGNEAGNAIADVLFGKVNPSARLPLTFPSRIEDVPAYLNHKSESGRIHYREDLFVGYKHYQARNITPLFPFGFGLSYTRFSYSNLVISVKPYSDVDLLHLNLTVTVSEEAHGQRASPAR

SEQ ID NO: 152 - protein, 859 aa, Kocuria rosea
MSDLWHGEEHAPGESDTAMTDATRTSGRAARLTELVDRLSLAEKVHLLTGETAFTLPGNERIGLAALAFSDGPTGVRGLTFVGGDAVALFPSATLIAGAFDDGIAEEVGRMLAEEAQRQHIHVVLGPTINLHRTPLGGRLFEAYSEDPYLTGRTAAAYVRGMQERGTAACLKHLVANESETLRNFMDSRVPETALRELYLLPFEMAVQDAGAWSMMAAYNDVNGVAATEHDHVQNGIVKGEWAWDGLIMSDWFATKRTAASASGGLDLVMPGPGGPWGERLVTAVRAGEVAEETIDDHVLRLLHLAERVGGLTPPGRQSRPWAQDLPAVDSPQRKEQLRRIAVRGMTVVANDGVLPLAVEGDAGQDVALIGRHAIDTVDMGGGSAVVNPPYLSTIAEGLAALLGDRVRVADGPAVRTRPVPADPAFLTDPATGTPGMQVVLLGADGTELTRYHSDSPAISLDGHDDLGEVPATAVLTTILANDAGPVRLGAVGAGRWDLVAEGQELSAELRLEGQDPGEAMLRPPAFAETVELPAAATLTATVAPAPVDWREVLLGDPGLGLAEESHLLQMTTAGKTALVAAPAPRPDDDLLAAAEAAAVAAGTAVVVVGLTEEQETEAADKTTLVLPGRQDELVRRVATAAERTVVVVNAATPVLMPWLDQVDAVLVAGLPGQEGGHAVAAALTGALEPTGRLVTSWPAADGAAPAWDVVPDGDRALSYDDGTFIGHRGYHAGHAPAPLFWFGHGLGYGTWEYGTVRARAGEGGPVVDVELTNTSSRASRETVQVYLDPAEDDQPIRLIGYQGVDVPSGATAAVRVRCDDRLLRRWDDAAGTWAPLAGGGELVLARGLGDVRARVPLA

SEQ ID NO: 153 - protein, 625 aa, Unknown
  Teredinibacter sp.
MLLFNCKAHSTFFTRSAFFLTPFLVLMLNACDKKSEVLPDVENQNESKDALALSVTPAPVTFDPAFYHVDFGKNVLVFDPSMDTQLMQDALDRLHEQQAFDEFSSQRYALLFKPGQYNLNITVDYYTQALGLGQLPSDTRINGAVQSVTTTEGTKVTTMFWRSAENFYVKPQDELMYWAVSQAAPYRRMHVAGNVNFDKHGWASGGVLANSIIEGRAGLTSGQQWFVRNSQVGKWEGGNWNRVFVGVEGAPARDWPKKPTTVIDATPIVREKPQLMLNEQDEYVVFVPEVRHNTSGVSWLPREGKAEAGKHIPLHDFYIARADKDDSDSINAALKQGKHLLLTPGVYKMEETIHIEHADTVVYGLGLPTIIPIKGQTAIETADKDGIILAGVMVDAGLLSSPSLITVGEEKASADHAQNPVSLHDVYCRVGGALYGTADTCLTINSHQVLVDHVWLWRADHGVGADWEINKSRHGLVVNGDDVTIYGLFNEHFQEYQTVWNGERGRTYFYQSEIPYQPPSYEAWNDGSKMGFASYKVADSVTSHQAWGLGIYSFFRGKSTIENNMRLSNAIEAPEHAGIEFQHMIIFAGLNGGIDHVINGQGPSVNVGELKFFERFNGAEASPTH

SEQ ID NO: 154 - protein, 747 aa, Aspergillus niger
MVVSEKAALYPLPLPLRPLGRYSQHWHLVVELGEWEAAYEKASVFVANLTTAQKVALITGSSVESTKANFTAFYFLDGDMGLQDFYYVSAFSLSSALAMTWDRDAIYSQAKAVGSEFYNKGIQVVAGPTSQPLGRTVWGGRNVEGFGPDPYLNGLATGLTTKAYVDAGVIAGGKHFIFNEQETNRSASDATGAPYSSNVDDKATHETYLWPFYDAVKNGLGAVMCAMNKVNGTLACENSDLLMKTLKTELGFPGLVWPDFNAQSSASTSALGGEDYGSSTYWSTSTIQKLLSNGTLSEARFNDMAIRNLMAYYYVHLDNGLQPTTRPTDTYVKVRVNHSKLIRENGAKSMALLKNKNGALPLKSPHVMGIFGAHAGSVMGGPNGAIDVEGSGPTYQGHLVTGSGSGRGSVPYVITPLHALTDRASQDGTMLRWILNDTYTSTDSSSLVDSSTIYTNIEPSYANFATESSVCLVFLNALAGEGADRTELYNSDQDSMVIHVADNCNNTIVIINTVGPRLMEQWIDHDNITAVLYGSLLGQESGNSIVDILYGDVNPSARLIHTIAKNESDYNVGICYTAQCNFTEGVYLDYRYFNKHDITPRYPFGHGLSYTTFDYSDLHITAPSSISKAPQGKKSVGGPSDLWDNVASVSVLITNNGTLAGAEVPQLYIEFPEAADQPVRQLRGFERVEIDAGGHSYVTFDLRRRDLSYWDVLAQEWLVASGSYNVYVGASSRDLRLNGTFSLTVTA

SEQ ID NO: 155 - protein, 744 aa, Laccaria bicolor
MIPDFGPAWATAYEKAKAKLAGFTLEEKVNVTTGVGWANGRCVGNIPPVEPTQGRGWPGLCLEDSPLGVRFGDFVTAFPTGVNAAASFNRRLIRLRGLFMGLEHKGKGVNIALGPMMNMGRVAQGGRNWEGFGADPYLTGEAAYETILGMQMGGVQACAKHLINKHQEHFRTQESSDVDDRTQHEIYAHPFLRSVMAGVTSLMCSYNLINGTYACENDKMLNDIVKREFGFQGFIMSDWAATHSTISVMTGLDMTMPGDITFDSGTSYFGDNLIAYIQNGTIPESRLDDMATRILAAWYFLHQDAPSYPPTNFDAFRPDNETTNEHIDVQDDHHWLVRELGAASTVLLKNVGGALPLGKKDRSIVLVGSDAGPGSIGPNEFADRGGSDGILAMGWGSGTANFTYLVSPLEAIQRKAREFRTSVSWILDDFNLALAGNMARKRSAALVFISSDSGEGYITVDGNEGDRKNLTAWHGGDDLVLAVAAQNNNTIVVVNSVGPLIIEPWIDHPNVTAVVWAGLQGNEAGNSLVDVLYGDWNPSGRLPYTIAKNIADYPAQLITGGEGQDILDIPYSEALEIDYRHFDAKNITPRFEFGFGLSYTTFKYSGLSISKIESPVNDALIDNWENGGATPIEEGSSRAAWLHEPAFSVSFTVHNAGSSFGGDIPQLYVNFPASAGEPPSVLRGFTDVEVAPYEREKVTIILSRYDLSIWDTEAQGWRKPKGTIHLSVGASSRDIRLRGKIPAE

SEQ ID NO: 156 - protein, 774 aa, Pedosphaera parvula
MTKPSPKIPDYKNPRVVAARRVKDLLARMTLEEKAAQMMCVWQEKAAKLLDGNGNFDPAKAKAAFKKGHGLGQVGRPSDAGSDPATPANGKTARGMAELTNAIQKFFLEHSRLGIPVMFHEECLHGHAARDGTSFPQPIGLGATFNPALVEKLYAMTAHETRVRGGHQALTPVVDVARDARWGRVEETYGEDPFLNTQLGIAAVRGFQGDASFKDKKHVIATLKHFAAHGQPESGQNCAPVNVSERLLRETFLHPFRDCLKKGGAISVMASYNEIDGVPSHASRWLLRDVLRKEWGFKGFVVSDYYAIWELSHRPDSHGHHVAADKKEACVLAVKAGVNIEFPEPDCYRHLVELVRKKVLHETELDELIAPMLLWKFKMGLFDDPYVDPEEAARVVGCEVHRELASEAARETITLLKNENDLLPLNPAKLKTVAVIGPNANRSLLGGYSGVPAHNVTVLDGIKARLGGAVKVVHAEGCKITVGGSWQQDEVLASDPAEDRKQIDEAVKVAWSADVVIVAIGGNEQTSREAWSLKHMGDRTSLDLIGHQDELIRALLATGKPVVALVFNGRPLAINHVAQNVPAILECWYLGQECGSAVAAVLFGDHNPGGKLPISIPRSVGQLPVFYNHKPSARRGFLWDEATPLFPFGFGLSYTKFTFKNVRLAKKIISRTGSTHVSVDVTNAGKRAGTEVVQVYVRDLISSVTRPVKELKVFQKITLAPGETKTVSLDLTPESLAFYDVNMKYVVEPGEFEIMVGNSSRDVDLQKVVLRVVK

SEQ ID NO: 157 - protein, 809 aa, Megamonas hypermegale
MNKPIYKNAKYNIEDRVNDLLSRMTLEEKVMQLCSELPSNFIFNGEIDYTKLKSFGKNGYGRITQYSLVGLVSPQKIVKTSNSIQKFFIEETRLGIPIILQSESLVGYPGKEGTIFPSMLNLAATWEPSLVKKMAEIIGEECHAVGINTVMSPVVDISRDLRWGRCYETFGEDVYLTTQMGINYVKGIQSKNVSCIAKHFLGYAETQGGLNTAVTRLNKKELYEVFATPFEAMDKIANLDGMMASYSEIDGLPVGCNKEIIHDLLRKTMGFKGLLTSDGAAIWKIYDYFKIAQTYAEAGLLAKKAGLDTEIPVSGTYRHLTDFVKNNKLNEHIIDESVKRVLTIKFKLGLFEKPYIEEKNIFNQLTNNTKKKFSEQIAENSIVLLSNKEHILPITSNCTIGLIGPHANSKRYPISGYSYPAYIEMVQALKNKSNKDISFNGVIDEENKMQDSQSFNSMYNIFQNTDWNYLNNTNTIMQNIQATTLKEELETFYKLNYSMGCDITNTNFDDIENAYKIAQESDIIILTVGGNCGWVNVTIGEGKDRCTLDLPGLQQKLLSKLQMANKHIILIMYGTIYNISSTKNIKAILYAGLPGPYSGKAIANIIKGNANPSGKLPFTIPRSVGQIPIYYNHKVGSGYHSIGDKAMSTIFSGGYIDGIYSPLYPFGFGLSYTSFLISDINIKNKIIKLGDDIKLSCKIKNTGSFAGSEVVQIYYYFKEAHVIRPNKQLIAFQKITLKSNECKTILFTINTKQLGYYNEEMQFVIEPGMANLMIGTSSEDIIYQTNIQLIGNPLNIIGNRTYSSQNKII

SEQ ID NO: 158 - protein, 858 aa, Armillaria gallica
MAPYDLESYGTADLHDVLSKLTVAEKISLLAGPDWWTTTPLPRVGVPHIKCSDGPNGVRGSSHFLPTPAQCIPCATALGATFDISLINNVGGLLARECKAKGSSLLLAPTCNIQRNPLNGRAFESFSEDPFLSGTIAAHYILGLQNNGVGAVIKHFVCNDMEHERLSVDIRVGERALREIYLMPFMLAQKIAKPWAVMTSYSRVNGIHCSENHRLLQTVLREEWGFDGMVMSDWSGTYSTAEAVHAGLDLEMPGPTRWRGDLINHLIHAGKVSFDTLSSRAYAILQIVQRAVRADPSLVKNNTLPERQLDSPDDIILNRRVAAESIVLLKNDLGVLPLDVKKIKKLAVIGPNVKTRTVSGGGSAFLLSSYVVTPLEGIEAALEGTEIDVVYSPGCYAHRYLPMLDGWIKTADGTDGWTATFYNCDPDAGASPLSTYTLLSTRLRINDEKPKGLAEHFYIILRGYLTAQESGPFDLGISLVGRATVSLDGKLMVDNGMNRPQTPGDSFYGLGSIEETATVNLVKGQTYEILVKYTNTPIPISSDQGAEVKQPPLMMAALRVSGAPKIDPATALDDAVTLARDADAVVCVIGTNMDWEAEASDRKGLDLPGLTDELVRRLLDANQTTVVINQSGSAVAFPWVDRASTVVQAWFTGNECGNALADVIFGRVNPAGRLPLTFPKCIEDCTAHLNWGAESGRVTYGEGIFVGYRGYEETKREPTFYFGHGLSYTTFEWSPLEVKLTSASNEISVAAKLTVTNTGSLPGSDVVQLYVIDKVCSYRRPKRELKGFAKTEILSPSQSQEVLIMLDKAAFSFYNDARMAWVVEKGLFEVCASRSANVVDVMSVVEVLIDEDLIWSGI

SEQ ID NO: 159 - protein, 897 aa, Unknown
  Micromonospora sp.
MRHYAEEGSSERAGDRNMPETRPSSGSPPPPATETPMSPVPPHLSPPRPPLRRLLAVLATLLATVALVAPPSPVRAADPLISQGRPTAASSVENAGTPASNATDGDTGTRWSSAFGDPQWIQVDLGATATVSRVTLVWEAAYARSYQVQTSTDGAAWTTVFSTTAGDGGTDDLTVSGTGRYVRMTGTARATAYGYSLWEFQVYGSTAGGTGCDTATNAAQGRPATASSTENAGTPATAAVDGSPTTRWASAASDPQWLQVDLGSVRTLCRVVLSWEAAYGRAYQIQTSTDGAAWTTVYATTTGDGGTDTLTVSGSGRYLRMYGTARATGWGYSLWEVTVNTAGGGTIPGGGSLGPNVLTFDPSMSSASIQSQLDAVFRTQESNQFGTQRYALMFKPGDYSGINAQIGFYTSIMGLGRNPGDVRIHGDVTVDAGWFNGNATQNFWRSASNMQVFPSAGFTRWAVSQAAPFRRMDIQGDLNLAPNGYGWASGGYIADSRVTGVVQPYSQQQWYTRDSNVGGYLNAVWNVTNSGVVGAPATSFPNPAYTTLAQTPVSRDIPYLYLDGSGNYQVFVPSTRTNASGASWLGGATAGTSVPLSQFYVAKPGDSAATINAALAQGLNLLFTPGIYPVSQTITVNRPGTVVLGVGYPTLIPQNGVTAMSVADVDGVRLAGLLFDAGPTNSPVLLQVGTAGSSASHAANPTSIQDVFFRIGGAGAGKATTSLVVNQNDALIDHIWAWRADHGTGVGWTVNTADTGLIVNGNNVTALGLFVEHYQKYEVIWNGENGRIIFFQNELPYDPPSASAWMNGSRVGYAAVKVADAVSTFEGWGMGSYCYFNVDPTIAAYHGFEAPIKSGVKFHSLLTVSLGGNGSITHVINDTGGTAQGTNTVPVNLVSYP

SEQ ID NO: 160 - protein, 481 aa, Unknown
  Klebsiella oxytoca
MSDHGAIKELIKHGVAADPEDAVRVALKSGINMSMSDEYYSKYLPGLVKSGKVTMAELDDATRHVLNVKYDMGLFNDPYSHLGPKDSDPQDTNAESRLHRKEAREVARESLVLLKNRLDTLPLKKSGTIAVIGALADSKRDMMGSWSAAGVADQSVTVLAGMQKALGDQGKIIYAKGANVTDDKGIVDFLNLYEKAVQVDPRSPQEMIDEAVAAAKQSDVVVAVVGEAQGMAHEASSRTDITLPQSQRALISALKATGKPLVLVLMNGRPLALVKEDQQADAILETWFAGTEGGNAIADVLFGDYNPSGKLPMSFPRSVGQIPTYYSHLNTGRPYNADKPNKYTSRYFDEANGPLYPFGYGLSYTTFSVSDVKMSAPTLQRDGSVTASVQVTNTGKREGATVIQLYLQDVTASLSRPVKMLRGFKKVTLKPGETQTVSFPIDIEALKFWNQQMKYDAEPGKFNVFIGVDSARVKQGEFELL

SEQ ID NO: 161 - protein, 465 aa, Candidatus ozemobacter
MEYRFPEGFVWGAATAALQVEGALDADGRGPSVWDVFCREHPERIFGGVTPAVACDHYHRFAEDVRLMKEFGLTGYRLSIAWPRLFPTGDGPLNEAGAAFYHRLFDALTAAGIEPHVTLFHWDLPQALAERGGWENPATVAAFVAYAQTCFRLFGDRVRRWATFNEPSWMILNGWLTGLHPPAWRDPAAAVRVSTAVLGAHARAVRAFREGGHLGAIGIVLNLSPVYPATERPEDATAAQRADGILNRWFRRPVLHGSFPEDIWALYEDCRIAPALTPDDRQALAEARPDFLGVNYYYPHHAVADAAETSFHLNITGDRREDCVFALAGLFRFVKNPTGRYTDWGWEIYPEGLYDLLKNINEERPDLPLFVTENGIGLADRVVDGRVDDQARIAFVREHLQAVHRAIAAGVPVRGYFLWSLLDNFSWLNGYRKRYGLFFVDRLTLRRIPKASAFWYREVARANGF

SEQ ID NO: 162 - protein, 843 aa, Coleophoma crateriformis
MAAGHVSDELPFDVETVISEATVLEKIGLLSGKDAWHTLDIPRLNVPSIRFTDGPNGARGTRFTAGVPAACLPCGSAMGATWNQNLIHQAGVLIGEEVKVKGAHGWLGPTVNMHRSPLGGRGFESFAEDPFLSGKLAGSYIKGAQSTGIVSTLKHFVANDQEHERMAVDVKVTDRALREIYMLPFQIALRDGKPGAIMTSYNKVNGTHVSESEEFIEDILREEWQFKGMVMSDWYGTYSTSDALNAGLDLEMPGPTRWRGIIADLAVSSRKVTHRTLDARARNVLELVKRCSKIKGVSPVEGKRDLPSDRALNRKVAAESIVLLKNDNKVLPLSADIDEIALIGPNMMNGAYCGGGSAQLDAYYIVNNYEGIVSRLTQHRPHTDVKIHYEMGTRAYGFLPLLGQTVSTPDGQIGKLRMRFFDQPPTVPDREVIDELIITESTWQLMGYSHPRISARFWTDVEGVFQPSESATFEWGIACYGTASLFIDDQLVIDNTTNQEAGNTFFGKGTTEKKCILDMKKGTNYNIRLEFGSAATTKVIKPGVVSYGGGAGRIGAAPMLDPESSIERAVQLAKRCKHTIICVGLDKDLESEGYDRADMNLPGATSELITRVLQANPDTIVVTQSGTPINMQPWVAQTTTQVHMWYGGNESGNGLADVLFGVENPSGKLPVTFPVAVEDTPAFLNFESERGSVVYGEGIYVGYRYYEKLKRSVTFPFGHGLSFTTFSFSALQVSSEGTKFRVRNSGSVDGSTVAQLYISPAPTNTISRPVKELKGFSKVFLLAGEEKEVFIPLDRLATSFWDEVLGCWVSEKGIYGVHIGESSVEICLQGSLHVDKTTTWSGL

SEQ ID NO: 163 - protein, 808 aa, Apiotrichum porosum
MSPIAIADAPAPSAAVSKLTLDEKISLLSGRTFCDTAEIQRLGIPSVKVSDGPSGCRGQLMFDALSSAVFPNSSSLASTWNPDLIESVGVELGHECKLKSVQTLLAPTVNLHRDPRGGRNFECYSEDPIHTAVIAAAYVKGIQSTGVGTCVKHLVCNERETRRKLYDVEISEKALREVYLRTWEIIIKEAQPWSVMTAYNDLNGKPCSEHDEVIRIVREEFGFEGMVMSDWFGTKDGVRSLTAGMDLEMPFPVHRRRQLPGALAKGEVSEEVVDRAVQRMLQWIKQTNPPLNRPEERPFDNNTHRMEVARQAATEGLVLLRNDQNVLPLRKTPGSKLAVIGYFAQNPTLCGGGSASVEPPYRTIPLETIRKAAPEVEVTHHAGVPIWRIVPVVDKRLASSIQFTLFNKGEEKPVYQGKREKSAFSLLDEKIPALGDQFTIELECEVTAPTTGRYVLGVFAVGTTEIFVDGKSLATFTPAHMSTEQFIFNRFDYEERFELDLTAGKTFTIKVVSQSKTAEGFEPAPQGLNLGLTEVIDEDAEIAGAVEIARSADQVVLFTGLNGEWESEGSDRADIHLPRSQEKLVKAVLAVRSDVVLVNQSGSAIDLEFCESIHGIVQAFLGGMEGGNAIADTLFGDANPSGRLSMTFPKRLEDHASYESFTNEVDGRLVYTEDIEFGYRSYEKNGVEPAYPFGYGLSYTDFDWSASKLVSSDPAAAVVTTTVTNSGTAAGRDVVQLYLSPPGGTRKLAAFGKTPQLEAGASHTLTLSIDKREFESWNGSGWEIAPGKWTVSLCRNARDVEWTAEIAL

SEQ ID NO: 164 - protein, 785 aa, Acholeplasma hippikon
MELTLDEKIELLEGLDVWHTKHFNKLSKFMMADGPHGLRKQLSHGDNLGINGSEVATLFPTASLLASSFDRNLLEKLGNALANQAKSQEVNMVLGPGINIKRTPLCGRNFEYFSEDPYLTGELASSYVRGVESNRIGTSVKHFFANNQETNRLFINTVVDERALHEIYLKAFKRVIKEKPASIMASYNKINGYYGTEHPIINNLLRNEWGYKGVVVSDWGAIDNRLNALKEGTDLEMPSSKGYYSKIVKDSLSDQPDLVNYIDESTNRIIEMINKYQINEKIETDFEVDHELAIKIALESMVLLKNDNILPLSNHKKTVIIGGFIENIRTQGGGSSHINPYRVDQINEIYQSYFEHAKLSLGYELDHDGKSPLLFEDACKKAKESDQVIYLMGLPERLETEGIDRKTINLPKTQVDLLKELYKVNQNIVVVLLTGSVVDTSYKDYAKGILLAYLPGEGGAHAILKTLIGESNPSGRLPETWIENLNDVPKIGYDNASVYYDESIFVGYRKYSSFNIKVNYPFGYGLSYSKLTYDDFKIEAHDTFYLLSMKIKNESEMDAKEVIQVYLETIKSGIFRPKKELVAFDKVEIKKQKEKLVEIKVYKQNLTFYDVTTNKFVTETGNYKLNISKNVDDVIHAFDINLEGNKTFEVTYHEPWKLYKKENFSKLFNHDLPPKNIIYKKPFDLSTPLFALKGTFMGRRVVNYIIKEATKQISDSKQSWMRQIVENSLLEMPLRSLASFGSSVLNFEMVEGIADLASNKLLKGIKKIKRGQKDLKHEWKNQPKN

SEQ ID NO: 165 - protein, 756 aa, Streptomyces spectabilis
MRELRRRTLLSGLSVVGGAAVAGGAVSTGVAEAAPRPGRHGREVEELLDRMTVEEKLGQLQQLAWAWDTGPGGGGTKDAEDAARAGRLGSVLSVFGAKSTNALQRIAVEESRLGIPLLFGLDVIHGFWTTFPIPLAQAASFDPEVTRTDAEVSAREARAHGVHWTFSPMMDVTHEPRWGRIAESCGEDPYLTAEFAAAKVKGYQGRDLRAKDRVAACAKHFVAYGGAEGGRDYNTVDVSESRLRNLYLPPFKAALDAGAATVMASFNTISGVPAHGNAHTLTDVLRKEWGFDGFVVSDWTGVQELVAHGFAEDGAAAARLALTAGVDMEMVSTTLREHGKQLLREGRISEQRLDEAVARILGLKFALGLFDDPYVDEAAAVDGPTPATRKAARSTAARSVVLLKNDRAALPLKKSVASLAVVGPFADSDDLLGTWVVPAAAKKYPSVKVLDAVRRAAPGAKVTYALGVDAEGEDTGGIPEAVAAARAADVTVVVVGEPPALSGEAAARADIGLPGAQEKLIEAVAATGKPFVVVLVNGRPLTVGGWLESAPAVLEAWHPGLEAGNAIADVLFGAVNPGGKLPVSFPRAVGQIPVHYNHESTGRPYAADNKYTSKYLDLPPDPQFAFGHGLSYTTFAIGEPRLSRTGIPARALRAGDTVEVSVTVANTGAREGDEVVQLYVHDLAASVAQPVRRLRGFRRVTLAAGASRTVRFRLGADDLGFWTNDPRGEFLVEEGAFDVYVGNSSTAKSKRRLTVT

SEQ ID NO: 166 - protein, 423 aa, Aspergillus niger
VAGTTTSLASGTQTYGGVTTIVETSTTVTCPYATVSPSGSTVTSIIQTTTYVCPEAGTYTIAPTTTYVPSNTVVTYPTVSTVTPGTYTHSAITVTATVTDYTYTCPFANANEPTSTPAAATTSAVVVTTPAPATTTAAAVTSSVQSSTVASSSAAASSGVSASGNSMGMTYTPYSNSGGCKSKATVESDIETIANKGFTHIRLYSTDCSTLEYVGAAASKYGLKLILGVYISSTGTSGAQDQVTAITEWGQWSMVTLIVVGNEAISDGYATASELATFISSCKSSFEAAGYTGQVTTTEPIDIWQEYGSSTLCSVVDVLGANIHPFFNSETTAAEAGTFAASEVALLKKICTNMDVINLETGWPSKGNANGAAVPGATEQATAIKGIRESVGELSVFFSYANDLWKDPGEYDVEQYWGCIDQF

SEQ ID NO: 167 - protein, 761 aa, Xanthomonas campestris
MSPRTTRRQLLGGAAALGLLARIPTGWALPSGAVRTPAFIDALIARMSVEEKAGQLSLFSSAQQDGKAIVANPLARSADGDDQLAAARAGRLTGVFNGSNVRWHQQLQKAALQSRLRIPLLFAADVIHGYTTVFPVPLAEAASFEPDLARRTARAAAMEASAVGLDWTFAPMVDIARDARWGRGVEGAGEDVLLARLFAQARVRGFQGDAGLANPDAMAACPKHFAAYGAAEGGLDYNRVDVSERTLREVYFPPFQAAFAAGAVTTMAAFNELSGIPATANVWLLDGVLRQEWNYPGLVVSDFSADQELVAHGVAADDREAARLAFMAGVDISMESGLYLRYLPALFAAGEVPMARLDASVRRVLTFKAALGLFDDPFRRIRPRLAQSRQRRAETLALAREAACKSVVLLKNDGELLPLRRSGQRIALIGPMARDWLNHAGPWSLFDEEDNRNTLAAALSGALDDPTALRVEDGCGFDQTLPGGVQAAVAAAGNADVALLAIGEPLSYSGEAQSRTEISIPEVQQQLLAAVIATGTPVVVLLSTGRALALEGPVLACASILVSWFLGSEASAAVADILFGTRAPSGRLPVSFPHAAGQVPYFYAHTSSGRPNPQPDVLEPYKTHYRTVPNTALFPFGHGLTYGRIEYGELRLSDTRMTATGSLRISARIHNRGTRDAEEVAQLYIRDRSASVTRPVRELKDFRKLAVPAGGSVAVEFVLRREDLLFIGQALQPTVEPGVFDVWVAPSAEAAGVSARFELLE

SEQ ID NO: 168 - protein, 795 aa, Lactobacillus paracasei
MGVVVSNFHLAKITAEEKVKLTSGKDFWTSEHLADKGIPSFRMSDGPHGLRYQALAADHLGINDSVPSTSFPTASASAAAWDPDLIQAMGKAIGLEAQSLGVDMVLGPGVNMKRNPLCGRNFEYFSEDPFLAGKLGAAWINGIQSQGIAACLKHFAANNQENDRLSSDSLVDPTALHEIYLEAFRIAVTESHPEAVMCSYNKINGTYASDNLYLMTQVLRQQFGFGGAVITDWGALNDKVAALNAGTDLEMPGDDHLFDGEALQAYQQGTLKLASLDRAVTKIAEIARKQRPKFQGSREQLLQANGQLAQKIAESAIVLLKNEAALLPLQATDTVAVIGELAKATRFQGAGSSHINASEIVSVLDGLKQKKVSFDYAAGYRLDDQDDSQATAEALALARNHDKVVFVAGLPDNYESEGFDRQNMALPKVQNDLLQAVTAVNPNVIVLLVAGAPVELPWVDQVKAVVNLSLGGERIGAAAANVLTGAVNPSGKLAESYPLKYQDVPSEDVYDKNPRSVPYVESTYVGYRYYDKAKVPVAFPFGFGLSYTSFALKNIQLSSDHVTDDQPLTISLQVTNTGKVDGAEVVQVYVQEQQPRPLRPEKSLKAFKKVFVKAGQTVNVALELKAQAFKEWREQTQTWVLPEAQKAIAVGTSVTNIDAVLPVSFTGETFNNFATIPNWYTTLSGKPSVQDFEQLTDQKVPAPHEFVPGEFTRLNTPREMKKHSLLLRIVAWITVKIRTKDYIDKQGPEAKFQQAIVLDTPLIRLAQQASGALKLSMVDRLVAAANHQYVKMIFR

SEQ ID NO: 169 - protein, 822 aa, Bifiguratus adelaidae
MASSRVTELLANLTLEEKVYLLSGSDNWRTFPVPRLGIPAVKVTDGPIGARGDSFNTGQNAACFPAPIAMASTWDTDLLLKVGSALGEEAKSKAAQVLLAPTINMHRSPLNGRNFECYSEDPFLTGKMATAFVSGLQSQGVAAAVKHFACNDSEFERDSISSEITERPFREIYLRPFEMVVRDADPWCIMTSYNKINGVFASENPKLLKEILRNEWNWKGMVMSDWFGVKSTVPSVLNGNDLEMPGPPAWRGEKLLAAIKQGELKEEDLNESVQRVLSFVERVGKFEDPEERPETYLAKPEITELIRNVSADSIILVKNEQSLPLNKDALKSVAIIGPNAKTAVTMGGGSSKVQAPHEVTPYEGIAAALGEDVDIRHSVGAYTHKLIPQLDDRLQTPDGELGYIMDVYESKNFGETPTDSKVLNNTRVIIHDAGFKDVDFRSFSAKVRARYTAKHTGPHTFGIASVGLSKLYVDGKLVIDNWTSQVRGDIFFGFGSREEKAQYDMIEGQTYEILIDYMTGHELMAMLRFGLLEPLASDVVEQAVKVAEGTDVAVVVVGLNNEWETEGYDKTELELPGGQNELIEAVANVNKNTIVVVQCGSPVVMPWIDKVSGVIVAWYGGQETGHSIADVLFGKVNPSGRLTQTFPKRLEDNPAFDNYPGENGKVIYGEGLFIGYRYYQRRKVDVFLPFGFGLSYTTFDYGNIKLDNSELDPQAHITVSVDVTNTGSIAGKEVVQVYVHDNHPRLSRPLAELKGFSKVELAPGETRTVQITLDKHAVAFYDDKEAVWVAEAGEFELHIGSSSADIRGKVPFTVTKSLSWTF

SEQ ID NO: 170 - protein, 807 aa, Unknown
  bacterium
MALLAGDSLWTVPGVPRLGIRPLKVSDGPAGVRGNRILPAAAFPAPVLLGATWDPQLVQRIGEALAEEAETKGAQVVLAPTINIQRTALGGRNFECFSEDPWLTAALAVAYVRGLQQRGIGACVKHFVANDQEFERMTVSIEVDERSLREIYLFPFTVAIAEADPWCIMAAYNRLAGTYCSEHPWLLTKILREELSYTGVVMSDWYATHSTVEALLAGLDLEMPGPPQWRGEKLRVAVEQGQVPLEAIDRSVRRVLQLYQRAGRLEPGAETTPERSVDRPEHRALIREAAATGMVLLRNDGILPLDLSAYRRVAVIGPHATRPAVGGGGSAFVRSHRIVTPIEALRAAAPETEFLVEEGAAIYKLIPPLDASQLGEEGVELSFYADTEFRGEPVATARVETTDLIWLGDIAPGVDPTAFSARIRVVLRPAESGRYTLGATAVGQIRLLLDGALVLDNWTAPQPGRTYFGFGSAEVRADVELEAGRPYNLVAEYRKAQPDMPLAGLRFGIVQALSEGERIARAVRAACEADLALVFVGLNPEWESEGFDRESFDLPGAQNDLVRAVAAVNPNTVVVLTAGSPVRLPWIDAVRGLLLAWYAGEEVGHAITDVLTGRREPGGRLPFSYPRRLEDTPPFHSYPGAFGRLHYSEEVFVGYRWYDARDIAPLFPFGYGLSYTQFAYRDLTLDRAKLEPGETLQVSCTVENIGRREGSEVVQLYIGFPASPVRRPPKELRRFQRVRLGPSEATTVTFTLDARDLAYFDEAAAAWIAPAGSYEVLVGAHSRDIRLRGLFELRSEGRWGAGDRFRH

SEQ ID NO: 171 - protein, 878 aa, Actinomadura parvosata
MRSEPPYRDASLPVADRVADLLGRMTLEEKAAQLAAPTAPAIDVHDPPPTGWGAVVAALSTLERSPRESAAAVNELQRKHVEDTRLGIPVLVAEEALVGLKIQGATMHPDAIAQAATWDPELIERMGTAIGTQMARTGVRQALSPLADTARDPRWGRVEETYGEEPYLVGSMATAFVRGMQEADAGTPLVATVKHFLGYSAGAGGRNTDSVSIGPRELREVHAVPFEMVIRDGGARGIMPAYVDIDGVPVTGSRAHLTGLLRDELGFDGLVISDLGAVNQLHTKHGTAHSDAAASAQAVRAGVHLDLVPRLATGHLIEAVESGLLPMADLDLAVSTVLRTKFELGLFERPYVDLEAVPETLDSAETRGLAREIAERSVVLLRNEPVNGVPLLPLDPGTATIAVIGPNADRLLGQLGNYSYPVLDSMAKRFALAADPTARADEAAEFGGSTGADRARLMVESVPVVTFLDGIRDRARGATVLYEPGCPIQDEDRSGIPAAVEAARSAQVAVVVVGDQAGINAFGTVGEGLDSATCELPGVQRELVEAVAATGTPTVVVLSHGRPYSLRWMTGSVPAIVTSWFGGEEAGSAVAAVLFGDVNPAGRLPVSFLDFAGSAPLPYWRAAQTPAYVEGRAGATFPFGHGLSYTTFAYRDLDISRPEVPADGEIELSFTVANVGDRAGDEVVQVYGQDVIARSVRPRRKLVAFRRVSLEAGAAVRVTATVPASMFALWDPEEGWLVEPGKIKLFIGGSSAQIHLRTSVTLTGGVHHPGADRALTSSMSVIPVDPETAARSAAARAAALRTAAPLSGDNTVLEWLEHPVGGDLLRGLLQGADEETLAPAFGMSLQQMALYSGGRIAPETVERLVAQVHAQMTAPQRA

SEQ ID NO: 172 - protein, 466 aa, Melissococcus plutonius
MSIISKVPTDFPENFLWGASTSAFQVEGAAFEDGKGISVADLRAKKSKFLDTSVTVDHYHHLEEDVRLMKELGLKSYRFSISWTRIYPNGNDLKPNEKGLAFYHKLINLLVENQIEPIVTIFHFDLPQQLVEQYNGWADRRCVDDYVCYAKLLFEEFGSQVNYWLTINEHSLLVNVPSMIGLHSDNMKELRQLAENANYYMFLAQAKVFNLCHAMLPKAMIGPAVSYMTNLPYQHKSTDALLGKSLEDVVSFLTMDVAVRGEFPSYYLRKLQEEGLKLPYLPEDEAVFATGRADFLGLNWYCTSIFRENEQASSKMLKGVIDHIERYEDPDLQHTDWGFSYDPVGLRYALQRVHDRFPNLPLMITECGWSERENLEKGQVHDTTRVNFLRDHIAQLREAIRDGVNVLSFNPWSFIDLLSVGDGMDKRYGLIYVDRDNHSAKDLKRYKKDSFYFYQKTIQQNAKNIQ

SEQ ID NO: 173 - protein, 535 aa, Enterococcus durans
MELSNQKLFNEYLQPYEAAVEANCELVMTAFNLLNGVPSTGNKWLNREILRERFGFNGVLVSDYAAVQELVFHGFAKDEQDAAKKALEAGVDFDMMTAVYANALPELAKDRAFAELLDEAVWRILILKNKLGLFEQPFRGLTEPNTGEVLTDEAKEVATKLVEKSCVLLKNETALPLKKTKDQRIAVIGPYAESHFTLGFWASVSGRSSDVLTLKAGLLEQFGQDLLLFSRGFNLYEDYSSFGPLKAGFEQLNGPIEDEEFLLEQSLEQAKKADVILLTIGENFLESGEGASKTNLRLPEKQIRLIKKLAELKKPIVGLLYTGRPLVLTEVESYFDSLLLVWFPGVMGGRGICNLLVGEASPSARLTMTFPKSEGQIPIYSAQTSTGRPLGENAHSERFVSKYIDETNEPLFSFGSGKSYADFEGAWQGVEEKTDGIHCCYEIVNQSEREAWVTPQIFLLNHPAEIVRPMKRLIATQHFLLAAKERKVVTFTLSEEEFTYFDNEGVRHLTSGNYTLQLDLLGIKNNQTFHLVKGE

SEQ ID NO: 174 - protein, 514 aa, Malassezia restricta
MAKIFRKFNEMLHQGGYDQAHVKVVPWDHPVGNRVKYLFRKQRGVNLGSWFALESWLTGSLFKNAKEPSSCDIDLVKGMKPDDAKALLEDHWDNFINDGDWSWMKAHGINSVRIPILYPHFLAGNPKHKKLLKGTEYGPYDFVYEGAWKRIVKAIEKARSLNIGVLIDVHGVPGGQNGDSHCGKSDGNAGFWHGSHASSNRKVTIKILVALAEAISCFENVIGLELMNEPQNHNALESFYAEAIKSIRCSSKPDAASMPLYVGDAWDTNHYTHYVGKHTSCDNPLVVDHHLYRCFTPNDHKTTAAAHANHLDVEHHGKTAVWLEHMANNAKNSIIIGEWSGALNPGSFQGCNGKLEARKQWSLAQWRAFEKLTAGYYYWTLKKEGGPDPGWCLYTAIEKGSMPPSLNPLDDTHVDLNLLKIEGEKCREQGYMKHVKYWDNKGGHFDHEQYNAGFKVGWFDALDFLADGAEIGLPFQLVQYRIKSYRKDHDHKFIWEFEHGYTQALNAFRRVLYA

SEQ ID NO: 175 - protein, 859 aa, Apiotrichum porosum
MSETSAFTDFDVADLEKATLLSGKNGYSSACLPQHGIPSLRMSDGPSACRGTTSVPELGLYAYQPSVFNGTPSNCYPCSLGLGASFDIELVADVAGQIAKEARAKNVHVLLAPTVNLVRSPLAGRGFEFFSEDPYHAGMMGAAHVKAVQAQGISACLKHFIANEQETEKHSNDSIVSPRALREVYLEPFRIVLHEASPLSIMTSYNRLNGLHTSEDKWLLHDVLRQEWNWKGTLISDWYGTYSCSTSIKAGLDIEMPGPALWRAAPQILSLLEAGKITTKDIDACATRVLSLVKHLLKSGLLFEDVENIVDTPESRNLLRRAAADAIVLLKNDAKVLPIDPSKLKRIAVIGLSAAMAHTSGGGAASVPTETFTVSPLAGIKGAVEPLGIQVDWAPGTSNYRFTPPLDPYLVGAAHPVEIEFWRSEPHAQWKDGVAGVIPSSAADHVLRVSTTKCFMHDGVPEDIINNARHVRLRTIFKAPLTGQWKFGISSIDQCQFFVDGTNIDYTTNLGKGELFFGFCHEERSIVMDLRQGQEYTIELRCWATGKMDSLPVKFSAGFQIGGAPALEPQQAIVEAVELAQSADITIVVVGLNKDYETEGNDRDDMDLPGTANDLVKAILATSQDVVVVNQSGMPVTMPWADDASTLLQAFYGGSNLGNGLADVLFGKVNPSGKLPVTFPRTLGDTPTATGYGTTAASVTKAYYQEDIFVGYRHFDRTARLPLFPFGHGLSYTTFEYSSLTATNPDGQEGKFRIQFTIKNTGHLFGKEAAQVYVADVKSSVVRPCKELKAFRKVALEPGQASEVVIELDKRALSFWEDSEEGGWRAEAGVFEVLVGPSSASLPLKVEITLERDIAWRGL

SEQ ID NO: 176 - protein, 825 aa, Unknown
  Streptomonospora sp.
MTTANRAAHAADAAREPQVEAALARLDLDGRIRLLSGATMWAIAPNPDIGLERLVMSDGPVGVRGEHWTPDDPALQLPSPTALAATWDTELIRTVGRTLAQEARRKGVHVLLAPTVNIHRSPLGGRHFECYSEDPLLTGRIGTAYVDGVQDGGVGTTVKHFVANDSETDRFTVDVRVDERTLREIYLAPFEAIVDGARPWGVMAAYNGVNGTTMTEHARLNAVLRDEWGFDGFIVSDWTAARDTVGCALAGMDVAMPGPSTVYGENLRAAVREGRVPEGAVEAMARRVLRLAARVGALEGAEPAVAPAALPPAIDGRAVAREAAARSFTLLRNEGRALPIDPARVGSVALIGLAADEARTSGGGSATVFTEHTVSPREGLRAALPESVRLDYAVGADPRASLPPLAGPLTAAFRDADGTVLATERLADGTARWIGELPDGVTAEGLSTIEVSGTLTPAYTGTHVFGAKGVGHFRLAVGGRVGFDGVNEVDGDDPGAGFLNPPESTAEFALTAGEAVEVSVVATVPGVSADFAFIGFSLNHSEPRAGDDELIEEAVRTAAGADVAIVIAATTEEVESEGFDRDSLELPGRQDELVSRVAAANPRTVAVVNTGSPVVMPWRGDVAAVLLTWFGGQELGAALADVLLGAEEPGGRLPTTWPAEQADVPVIGVRPDGGVLEYSEGVFVGYRAWQRLGAEPAYWFGHGLGYTTWDYTGADAAVRLDGGVSVTARLANTGARRGREVVQVYVSPQEEGGAPERPRRWLAGFAPVVAEPGASAEAVVEVPARAFQVWDSAAHDWRTVPGGYDVLVGRSVADTPVSARVEIAG

SEQ ID NO: 177 - protein, 738 aa, Lactobacillus gasseri
MKQKELKALLDDMSLDEKIGQLVQLSGEFLQANDISYGPREKLGITKETVNLIGSVLNVAGAKVTKKVQDMQMKVQPHHIPVLFMSDVIYGYKTVYPIPLGLGATWNPKLVENAFQKAANEASVAGIQVAYAPMIDVVHDARWGRVLESPGEDPYLNSVYAKSMVNGFQKKLGEKQGVVSCFKHYAAYGDVESGREYNTVDMSLSNLFQNYLPPYKAAVKAGAKMAMTSLASLNGVPSTADKWLLDTVLRKEWGFKGIIISDYASIYELIKHGFAGNIEQAAKKAIDAGVDIDMKSPCYAKGLKSLVTNNKLDEKKIDQATWRILCLKNELGLFENPYFGISEEKENSKKLSLSNKKLARKLASESLVLLKNKNKALPLRKEENIVLIGPYADSRQLLGMWAIHGNPQDTVSILEGMKKYSPDIKVAKGTDINRDRHIFEEMGFFSEEQIDQMVSAPEVEKENNQEALKLAARADTVILALGENSLESGEAGAKTNLCLPNNQLKLIKDISKLGKKVVVLVISGRPLVLTNIVDKVDAIVECWFPGTEGGNAIADVLFGKENPSGRLSMTFPYDVGQEPIYYNHFSTGRPYHGSQHKGRFVSKYLDAPVDPLYPFGYGLSYGKTKIKKIELSNKYLKLDEKVEVKISVENISDWDQKEAIQLYIHDKVAGLVQPVKRLIDFKKVDILKHSEAEISFEISPDQLGYFDNSGKKIIEKGEFDIFVGKNSMECLSTKLELI

SEQ ID NO: 178 - protein, 368 aa, Aspergillus niger
MSELYCPIPPRDQDIYRFRQQFGANLGSTFVLGPHDNTGESNELQLLKTSLASTGLEQTRQKWQSHWHSALTDDDLVWLKDVAQCRTLRLPLSFYSLGPLFCRGTAFEGDPSEVYHHCWSTVKHLIEKCWFHGIGILIDFQASASGINLCASAKDRTIARDCVAFLAQEITFHSMSAVVGLSVSSGCEPAPDMCECYDEILKIANAIDACLPVYIDDNQAQCNKRVFKGCESDIPQFKSDISIGKIQIPSQMMLPETEVREKINKAKAERSGFQEKVLSQVSESWGSNERQSFVHGWNLGYDDALRFFGAAVQGILAPRKGADKIYDIELWVQQRKRDIDPEQLGENSAAWEDGLRRGIQDFYNIIGI

SEQ ID NO: 179 - protein, 833 aa, Neosartorya fumigata
MANKGMDRSFMTASVEDLVQRMSLTEKVSLLSGEDWWRTTAVPRLNIPSIKLTDGPNGARGQSFFKMTPAVVLPNATGLAATFSPTLPAEAGRLLAAETKARGAVCLLAPTINICRSPLGGRTFESFGEDPTLSGIMAAKYVSALQDEGISAAIKHFVANDQEHERMGQDSIIAPRALREIYLRPFHIVQALAKPWSYMTSYNKLNGTHCSEHEWLLSGLLRTEWGFDGLVMSDWMGTYSVAEAINAGLDLEMPGQPRWRQLSLVRQLMNAHKISPVTIDERVRTILKWVQNLVVLNPDTVYGRDDSIEWTRTEDQAADAALIRRIGNEAIVMLKNESARLRPAWCVTPWQGLVDNKPDQVDLRYALGCKGAKFLPVFGEEFTSMDGTTRGFDMLHYAIVDGKQASQPAVSEVWTNSDIMLADFSHPDLGDDYFTEIRALFTAPITGEWQFEISVTGQAWVYIDDRLLADLSKEQKRTSSFFGNGGNGTVITFSVTKGKVYKFRLLHDSRKPPLAPGQDSQPLQLIGMKLGSFPAVNEDQTIDEAVELAKESDIALLMVGLDQDWESESYDRPDLSLPLRMNDLIRRVATEAPDTKKVVILQAGSAVSMPWLEHVDAVLWPWYGGNEAGNAIADVVYGTVNPSGRLPITLPKRELDIAANLNFKSARTKTYYEEGIWVGYRHFNARGIEPLYPFGHGLSYTTFDYSDLTVGPSASSSPDSWRISVSARVTNTGTVPGAHSVHFYTSPPPPTMTSLTHPAVTLQAFAKTAVLRPGQSERVTVEMDKFAISHWDELTSTWQAEPGQWHVKIGRDAQTMCIEAPFNVAPGFKWHGL

SEQ ID NO: 180 - protein, 461 aa, Eubacterium eligens
MFDKNFLWGTASSSYQIEGAFTEDGKGLSIWDTFSNKPGNIAHDENGNKACDHYHRYREDISLMKNLGIQAYRFSISWSRIFPDGIVKDSDGNIRYNKAGLDFYDNIVNFCLENNIKPFITIYHWDLPQALEDKGGWLNRETAFVFADYAEFICKHFSDRVTNIATINEPQIISGLGYMLGLHAPGKKLDTVSVLSVIHHLALAHGLAVTKMRAVAKQPVKIGFSSTGGLCYPSKECDEDIDAARAECFNIVKGNMTFNHTIFCDMTCLGRYPDIAGTELHLEPGLEKIGHYEELPFVKKGDIELIHQPIDYLGINVYNGHEINAAGYINKKPGSPRTALGWPVTPGVMNYGIRYLYERYNLPIYIFEDGLACNDIISLDGKVHDSNRIDFLTRYLTDLEKAYKAGVPILGYFHWSFTDNFEWHSGYDPRFGLVFVDYETQQRIPKDSAYWYSDLIKKSSN

SEQ ID NO: 181 - protein, 825 aa, Bifiguratus adelaidae
MDIGKIVSKLTLEEKVSLLAGKDWWSTVGIPEKGVPSIKTTDGPNGARGGTFSVKSACLPTGVCLGATFNIDLLEQIGKVLAEETRTKNARILLGPTVNIHRTVLAGRNFECYSEDPFLSGKLAAAYVRGLQGEKIAATIKHFVANDQETERMSISSEITERALREIYLMPFYIALKESDPWCLMTSYNKVNGQYASENAHTLHHILRGEWAYDGLVISDWFGTYSTEDAVNAGLDLEMPGPGLWRREKVLKAVQQGRIKEETIDHSVRRLLQVMEKTGWFKDAFDVFSTPERAIDVPEHHEILRNAAAEGMVLLKNNNSILPLDISKIKSIAVIGLSAKKPIYLGGGSSSVRPHYVISPLEAIQEIAAPYNVEVNYAQGAYTHSLIPYLAEDRLITLDGKEEGMMIEFFDNDDLQGEVKATKFYPNSRYKCNAIMPAGIDANHYSCRGTCRFEAPVDGEYTIGLVAAGPANMFVNGKKILSMNKMIIPGAYFTTRENEETVKITLKANMIYTITVEYRVTYRRPAVGFQIGVLEPIDDLIVENAAKVAEKADIALVFTGLNFEWESEGFDRSSMDLSGRQNELIRACAAANSKTIVVNNSGSPITMPWLDEVQGFLQAWFPGQECGHAIADILFGQRDPGGRLPTTFPKRLEDTPAFINFPGENGKVVYGEGLYVGYRYYDKTSTDVLFPFGFGLSYTTYKYSDATVQQQAETADNVSVNVTVNVTNTGSRTGQEVVQVYVHDKLAKLSRPDKELKGFAKIRLNPGETKQVSITLDRMAFGYYDDKTEHFVAEEGDFDIIIARSSKDIVQNLHFTLKKTMQWVY

SEQ ID NO: 182 - protein, 429 aa, Unknown
  bacterium
MDPFYWGLATSAFQMEGFVQNDMTQWEALGGFRQDGKNPLYQNGAAHWQYWQEDYRLLASIGVNAYRFSMEWARIEPKRGHYDQKSLDHYERMLDTLLKMGIEPFLTLHHFTHPVWFHAQTPWTSEAAQDVFCSFAEMLIKRFASKINYWITFNEPLVWVLAAYGDAKFPPGKNNVTEMIHAFLNILKTHACVYDRIKSARPLARVGLAKHFIVFAPGRKWFAADRSLADLLHGFFNKMTLDAFKLNRLKFRFPFLFNFDEPVVLNDKIDFWGVNYYYRMYSAFKLNFRRPIHFFFKDASGHGLTDMGWEIYPKGLGQILKAVARSGKDIFITENGIATTDEALRMRFMDEHIRQILSARQNGLPVRGYFYWTFLDNYEWLEGKSKRFGLVHVDYANDFARKVKPSAEHYARMIAGDCAGKAAPAKNKI

SEQ ID NO: 183 - protein, 855 aa, Corynespora cassiicola
MEISTLLDSLTLEEKCILLSGQNMWETASIPRLGIPSLKMTDGPAGVRGSRWVDGTPTTQIPCGISLAATFNPELMERIGQLLGFEAKCKNAQVLLAPTMNMSRSPFGGRNFENFGEDPYLTGRMATGFIKGVQEQGVAACMKHFVLNEQETRRFNMDEHIDERTLREVYLKPFMMALRADPWTAMTSYPKINGEHADTSQFLVKEILRKEWRYEGLVMSDWGGLNDTVKSILASTDLEMPGPAIRYGNALMKAVARGDVSENRDINPAVERLFHLLAKTGQLAGGQPRSGTSDVTPEAPEGESDNPEARRLVREAASQGIVLLKNSGILPLQSGQIRKLAVIGPNTKYPTTGGSGSAAVNPYYISTPLKAISQLARQRNSQVEILYERGIFTHKQPPLVGDCLTVHETGLPGLQVDFYDSDNFEGDIVATSHWNDSFLFFMSDGDVPKSLQGKTYSYKAHGILKPTVSGDYDLSFSSTGKAKLFIDDKILIDNTDWTEIGENFMNAGSIEKLASMYLEGGKMYKLRVDNVATPPPIRPLDNTLFGTLSGIRVGMFLQHDEDAMLDRAVSAAKDADVVVLVVGHNNDTEREGSDRTSLSLPKKTDQLVEKVCAVNSKVIVVTQSACAIAMPWVKLPAAIVHAWYQGQECGNALADVLFGVANPSGKLPITFPKRIEDHGSHKWFPGDFENDHTTYGEGVLVGYRWLDAHGLEPLWPFGYGLSYTSFKIENASVEGQVARMGWDTTAVVCFQISNTGTVAGSEVVQLYVSPSKKIEEMGRPAAPRSLAAFSKVFLSCGETKELKIRLSSDAFTWFDVEGKGGLDSGGKWRLDEGTYTCFIGASSRNLAATVDIVVR

SEQ ID NO: 184 - protein, 891 aa, Pseudomicrostroma glucosiphilum
MSYVHLLSQLTLEEKIQLTAGQDFWRTFSLPRHSIPYAKLTDGPNGARGGGDFQNSVPAALFPSPSCLSSTFDVSLARAMGEGIALDSLSKRCHISLAPTINITRDQRYGRAFENYGEDPLLSGHIGAHWTLGCQSVGVGATPKHFVLNEAEEDRRFSDSQVSQEAMREVYLEPFRTLFHEVAKGHKDGSDGEKSKVFGGQPACIMTAYNRVNGTSASENKFTLIDVLRKEWGWKGLVMSDWFALHSHALLTCDLEMPGPTIYRSPEAIKELIKKGDLSEADVDARATKVLELLEKIAPLGFVDSPDEEHEESIVDAGREEKIRTIATEGAVLLRNESETLPLDFVNRKTRKIALIGKPWKEPVQSGGGSANLTPQLAKPAFESLHEALDALPNGAGKDVELSYHFGCEIHRFPVEPKGEQRIPGGVKAEWFKGPHPPQPEDEDKEPAPLLEQHLAAPTLRAMDPKPDVLEANNFSLRATFSLVSQTAGRHKLGLTSLGNIRAIVTRQNGEEALDWKYEGARDVFSYFLDEYRTAQDGRVKMEAGEKVTVTLLYSPAQIEGDLAQQKSSAFRCGFDEEIDDKGEIEAAASLASSADVAIVMTAVGKDWESEGYDRPHLRLPRLQSELVERVAKAQKDTILVNVSGSAVELPFANQLKALVQTWYGGQEAGAAIVDILLGKGRAPASGRLCTTWPISVQDQPGGSSLELFPGKDLTGRGHPDVKYAEGRLVGYKWYEAKGIRPAHYFGSGIGGYTTFERKLLQVEAAIMKQEKKVEVAVEVTNTGKRSGKDVVQVYIAPPSDLIQGDVPHKELAAFSSVHLSAGEKTTLRLSVGERAFSHWRQDEQGGSGHWEVVPGEYHVILASSADPKDEIAREPVTVEKGWTWSGLGIV

SEQ ID NO: 185 - protein, 574 aa, Staphylococcus saprophyticus
MVKVDLTASPYHLNDNQIAWVEETLGTLTDEEKIGQLFFNLFSLEGGKKFFDADLTNKDILERYHIGGARYEGGNKEEVQNLLNDLQRHTKVPVLVAANCDSGGNGACKDGTYIASAAQCEAAQDTKVSYNAGLVSARESSALGVHINFYPCVDILKNWRNTIVNTRAYGTDAETVIKYSSAFIDGFNAERDMITCIKHFPGDGTEERDQHLVLGVNELSTDEWDDSFRKVYQHHIDRGVQMIMAGHIAQPAYSKKLNPSLEDKDILPATLSSELITDLLKDDMKFNGLVVTDASHMLGMTASMRREDYVPLAIAAGCDMFLFFNDLEEDYQFMLNGYKNGVITEERLNDAVRRILGLKSQLNLHMKQEDGSIIQPQEALDIIGCTEHLEMRAEAADLGITLVKNTLNQLPIRPETHKNIMLYVIEGEKDGIYKSANNVTDDIIKELESRGFNVTLNDGSTRIKGKTLEYREKVDAALVFANIIGYAAENNYRIKWGTAMSNEIPWYVHEVPTVFISTNFTTHLHDATMVKAYINAYHSNRENIKQTIDKIMGESEFKGQYNDLVWTEKWQAKL

SEQ ID NO: 186 - protein, 662 aa, Malassezia restricta
MQLTSTLLDFTKVASTLSLSVANYKPIPVLQTNDSSSHGRVGAVSNHKSGTEDHSAASWGMPSILHIPESSSKGNNGRVASSHKGSSGETVGTGCNVLDEYSPKDSLNVEFPPYNQTRANIMRYRKQIGVNGGSWFVLENWMAPSMFDCAADGKVSEMDFLNGYGGSEKGMKSAQARLEEHWDTWIQAKDFVEMKSLGLNTFRLPIGYWHLPGSNFTKNSDFEPYGKVYVNAWKYIKRAIKYADDNDIGVLIDMHGAYGSQNGQPHSGVNNGKADFFNDFNENKMTKLLVWLVQELEDVSNVIGIELLNEPHNTKRLWKWYSRTMDAMRKAQTKSRDMPLYFHDAFSPSQGAEFVSKRDDFVVQDTHSYFVYTQQDRDMSASKHTSHIEGQVQKSMSDLADKARGNMVVGEWSCALNPNSLRNSNNKRAATSDYCRAQTSTYLNATAGVMFWSWNMEHCSSNAGWCFKSVLPRYMKNSYNAWGLDGQITNKTINTVTEKIISQELPSKYRSDTKGKSLSVCNKDGGANQSSGSTKNSGRNAAVKKSQSHASKHDGSSKKNKHTLQHRSESHEGALNRRGFHHHVLSDILGYGDGFNTAKFLAGMMSLSRLGFEQQYLSDTGEYYKKHKIIDIGKHDSKSYKSHFKKGLNAMESKIIKIAEKA

SEQ ID NO: 187 - protein, 832 aa, Saitozyma podzolica
MVALISPLVNGHTATKKNIALVVEEALSELPIHEQVQLLGGKDFWHLNDLPHRNIPSVRLSDGPNGCRGTNFFNGQPSSCLPCATGLAASFDLDYIRDIGVQLGQECRAKAVHTGNEQEFERMKADSIISERALREIYLEPFRMAVKEAQPRCFMTGYNRLNGTHCSENAILLNDILRKEWGYDGLVMSDWTGTVSSAGTIKAGLDLEMPGPPVFRGSSTLRELQCGKLTPEDISSRAREVLKLVAFAQQSGIPFGAEEGSIDTAESRRLLRRAAAEAVVLLKNENGILPLRQPKKIAVIGHNARVAVVSGGGSAQLSPTFSTTPLAAITKAAESAGAEVKFAIGCLSYHYLPVATPLLSYPHDGSRPDVVASLSFWLSEPHPEFKSPKDTALRLTDEPDHNVLCNTAFAFITDGVPKPIVEGFPYMVYSSHFTPDQSCDWEFSLASVGHALLFIDGQLVADNTEWEQGDTFFGMGSRERKGIVKNMRQGRSVKVEIRSWPRDVQRVFPVKIAGAVRLGAVPMVDEAVAIAQAAKLAQESDTAVVVVGLNEDFECEGHDRTTINLPGAMNELVASVLAVKPDAIIVTQSGMPVAMPWADQAASLLHAFYGGNDLGTGIADVLFGKINPSSRLPVSFPRALSDMPSGTMFGAASPSPLRAVYTEVRAALAAVLDDIELIVSQDIYVGYRYFDHSGIRPLFPFGHGLSYTTFKYSDLILAPCAEDPTRFEISFGLTNSGALPGAEVSQIYVYAVEHAHRPQKELRAFTKTHLQVGENVTVNASLDRDAFKTWHEVRSCWTVAQGQYEVWIGQSAERIVLKGTLSIKETLYWSGL

SEQ ID NO: 188 - protein, 880 aa, Tremella mesenterica
MDRSFLSANIPDLVGRLTMEEKISLLAGEDFWSTVPIPRLNIPKIKMSDGPNGARGESFFKMTPAVAAPNATCLAATFSTSLVRSCAQLLAAETKARNAVCLLAPTINIQRSPLGGRAFESFSEDPTLSGLLAAAYVDGLQSSGVSATIKHFVANDQEDDRMGANCIISPRALREIYLRPFQIAQARSKPWAYMTAYSKINGIHCSENEWLIQDLLRKEWGHEGMVMSDWYGTYSVCESINAGCDLEMPGPTVWRGQQQVGHLIMAHKIDPRTIDRNAQRVLEWVQRCARMNEDLVYAPPKEERSRTENKEEDAKLLRRIGAEGIVLLKNEQDILPIEGKRKVAIIGPNAKSKILTGGGSALLRAAWAVTPWQGLEDNKPSEVELTYSYGCTGTKYLPVLDEHFTCIDGSPGFNLSHHNIVDGVQSEKPHVVDKWDSSDMFMGDYSPPGLQRPFVTELRAIFTSPIDGEYDFGLTVTGRGWLYLDDQLVVDNSSNQQRGEAFFGSGTVERVGKVRVHKDQKYILRVIHDGRKEMSGHGAGDPNPFPASGLRIGAFPSSDPEETMQQAVDLAKESDIAIVVVGLNSDWESEGYDRLNLSLPLRQNELVTRISAVNPNTVVVVQGGSAVSMPWKDEVKGIIHCWYGGNEAGNAIADILYGSVNPSGRLPISFPEKEEDIAAWTGRRSQGGEIRYEEGIWVGYRWHNVRKIKPLWAFGYGLSYTFWEYQDLSVTSHVKERDLDSENKLEVGNEGRIGRLEVGTKKVTVDEWRLKVSVKVKNIGKRKGDHSVHFYFSPPERKGMGLEHPQWTLQGFGKVYGVGSGKEELVEVEFDKYAISHWDPIHDVWRVEKGEWIVRIGIDSQTMWGKETFVIDEDMEWVGV

SEQ ID NO: 189 - protein, 473 aa, Unknown
  Arthrobacter sp.
MQNSAALQSLAERLDPEFVLGVAAAAFQIEGSLKADGRGPSGWDAFAEKPGSIMDGHSPAIACDHYNRSGEDVALMRELGINSYRFSISWPRIQPDGRGSFNSQGLDFYDRLIDQLLDAGISPMATLYHWDTPLPLEHGGGWLNRSTAERFAEYSAAAGERFGDRVAQWVTLNEPVSVTLNGYALGVHAPGHNLLFNALPSIHHQLLGHGLAVQALRAAGVTGAVGVTNLHSPVRPATRKPGDRMVARIFDILMNRIYADPVLLGRYPKLPLVVRPWFRSMGKISDADLRTIHQPLDFYGLNYYYPVKVAMGRGPVSVPANNSGALAQLPFHEVGYPEYETTGFGWPVAPKHIGILLREMKDRYGDALPPLYITESGASFPEPEHVTGPIADSNRIEYLASHLGHALAATSPGGLAEDVKLLGYYVWTLLDNFEWAAGYSQRFGLIHVDFDTLERTPKESFYWLQALSRARKA

SEQ ID NO: 190 - protein, 458 aa, Scheffersomyces stipitis
NITNSTIQSQYNSNNFQYQGVAIGGWLVLEPYITPSLFLAFNQTANTTEKDIPVDEYHYCKKLGYEEAEKRLTQHWDTFYTENDFADIKNAGLNMVRIPIGYWAFQKLDGDPYVSGAQDYLDKALEWAKNNDLKVWIDLHGVPGSQNGFDNSGFRDIGYPGWFNSTENVNLTKQVLHQIYHKYGTGENAINYRDTILGIEVVNEPFTPKLSMSRLQSFYIDTYIDSRKTQTLNNTIVIHDGFEGIGYWNDFLAGGKVYSNSSYLNTVASAEVFNVLIDHHHYEVFASSVASNITTHLSNIRGYSQSIKDELKYHPAVVGEWSAALTDCTPWLNGVGLGARYAGEAPYDNTTKVGKCDNINNFDKWTKQQKKNTRKFIEIQLDQYSRYSNGWIFWCWKTETTIEWDFKKLVELDLMPQPLNNFTYIVNGTDTDPDSGASLARLSLFIPVASVLMFVAFF

SEQ ID NO: 191 - protein, 460 aa, Leptothrix cholodnii
MNMPPNAAANPIAPPAGSAMNRRDFVWGVATASYQIEGAIDADGRLPSIWDTFCATPGKVLRGETGALACDHYHRWESDVDLIADLGVDAYRLSIAWPRVMHADGRPNQAGLDFYKRLLDRLAERGVKCMATLYHWDLPQHLEDRGGWLNRDTAYRFADYADLVSRELSGRVNAYATLNEPWCSAFLGYGNGHHAPGLANGRYATQAMHHLLLAHGLALAPLAANDPQAQRGIVANVGRGSTLGDSAADHEAARLFELQHNDWVLQPLLKGSYPQDLFKLWPGTEPLVLDGDLATISGPLDFLGINYYFRSTVQSDGAHGYTEVTRPDVERTQMGWEVYPQGLEDLLRGFHTSYPNLPPIYITENGMSSDDRVVNGPNGPRVDDAQRQSFLQRHFAAISRAIDAGVDVRGYYIWSLMDNFEWAFGYERRFGLVHVDYATQQRTLKDSALLFQHYLAQRKG

SEQ ID NO: 192 - protein, 368 aa, Unknown
  Thauera sp.
METTRTKLRGVNLGSWLLLEKWMVPSLFEGLEATDETTWCAELGPAATERLRRHWNTFVTREDFAWIAARGLNAVRIPIGHWIFGPDYPYHPKYGAHRHPFVTGGIEVLDRALDWAQEFGLRVIIDLHAAPGCQNGFDNGGIKDVVEWHTKKEYLEHSLAVLERLAERYRAHPALHGIELLNEPRWDVPTDYLKSYYLEAYARIRKHCAPETVAVVFHDGFRSFREYLGFMQAPAFRNVVFDYHRYQCFERCDIDMDIHGHIRKAAVDWREEADAINAELGLPAVCGEWSLGLDLKVVSLWAEGPFNHALEHMDDFQQDVASRAYGDSQLMTFERLAGWFFWSYKTETTPAWCLRACVERGWLPSRFG

SEQ ID NO: 193 - protein, 416 aa, Kosmotoga olearia
MKSFPAGFMWGVATAGHQIEGGNYFSDWYKWEMEGKVKNGDTSETACDSWNQLDRDLEILKKLSVKAYRYSIEWARVEPKLNKFDEESLNKYRDFTIKLVEANIKPIITLHHFVNPQWFAEIGGWESRENLRYFLRYVNKVVDTLGEFVPFWITINEPNVYAIKSYLMGEWPPEVKDRGRAFQVLKNLLIAHTEAYDIIKSRYPSAMVSVAYNFVPFYPYRKWHPLDIITAFTLNKTYNYAFLDSIKHGKFYKPIGSGEKNKKLKDKLDFIGVNYYTRYFVKYSKPEPELVDTGNKKTDMGYEFYPEGLRTIIMKCHKDYSLPILITENGIADATDEKRWKYIKKALEAVHKSLKGGAKVIGYMYWSLMDNFEWSEGYSMKFGLYKTKRNPLELVPRSSASKYADVIKNNALTDDD

SEQ ID NO: 194 - protein, 731 aa, Roseburia intestinalis
MERDSRKRAEALLAQMTATEKVGQLNQHLYGFRIYHVEDGKIIFTQELKDEVKKWGGIGTIYGLYRADPWSEKNYETGLAGGLSMQAYNQLQKYVIEHSRLGIPFLLSSECPHGYQALDGYLLPVNLAVGASFDPALYERAGQVCGRQLKQMGVDFALVSTLDILRDPRWGRSEECYGEDPYLSAELARAIVTGIQKEGVAVVAKHFCAQGETTGGVNASAARIGERELWEIHLQAAKACCEAGVKGIMAAYNEIDGKFCHANRHLLQDILREQLGFDGVVMADGIAIDQLDIMTGDNIRSAALALKAGVDISLWDEGYTKLEEALKQGFITEKELDQAVLRVLTLKFEQGLMDKPYIDENGNRTASYSENGAVSFPIEAYQESEKLARESVVLLKNENVLPIGRAEKIALIGPNADDIYRQIGDYSPPMDRAGYETLKSGMEKEFGADRVRCYNGHEVGTAVSLAENADIIVLALGGSSSRFKGALFDENGAAKVQGVLEMDCGEGMDTARLQLPGNQNELFTAVCALKKPVISVVIAGRPYAIPEIAQDSDALLYAFYPGPMGGKAIAELLSGKYAPSGRLPVSLPRNCGQLPVYYNHTVSYPAMHYCDMEHGVLYTFGEGMGYSHMEYVDICLKKQQDVWIISGIVKNKGNIDDTAVLQCYRKVLSGELVPRERELVAFSRIKVEKGGQKAFEIVMDADKFRYFNESGAKIYKSKILLMDSGKIIFEE

SEQ ID NO: 195 - protein, 472 aa, Streptococcus equinus
MLHKNLNPFPEHFLWGASTSAYQVEGAALEDGKGPSCQDVKEIPAGTADLSVSVDHYHHYKEDIALMAEMGFKSYRFSISWTRVLPNGTGEVNPKGIEFYNNLIDECLKYDIEPIVTMFHFDMPAALDERGSWSTHDSVDWFAEYARVLFENFGDRVKYWLTINEQNMLTLVGPVIGTLHVPEGTTNLTKEIYQQNHHQLVAQAKAMQLCHEMLPDAKIGPAPNISLVYPASSKPEDVIAAQNFNALRNWLYLDAYVFGEYNNLAWAYLEENDALPTVTDEDRAIMKAAKPDFIGFNYYNTATVEASDGSEVAGANGDQQSNQTFPGFAKSVDNPNLVKTEFGWEIDPIGFRATVREMYSRYRLPLLVTENGLGAYDTLTEDGKIHDNYRIEYLRQHIAQIQLAISDGVDMLGYNPWSAIDLISTHEGIRKRYGFIYVDRTDEEVGSLKRYRKDSFFWYKKVIATNGQDLSD

SEQ ID NO: 196 - protein, 391 aa, Streptococcus cristatus
MIRNTMPNSNKGLGTTDVLPISEPRIGVLTGEINYKKVPIGAYDLLGQFTLASQPNYVSDLNMIQSMGFNVYRISISWARIFPTGEEAQPSEEGLKYYEAIIDQVLQKDIEPIVTLSHFDLPLHLYEKYGAWKSRKMLELYEHYTEAVFRHFKDKVRYWITFNEFNILHHLPYLGGGLSFEDGENRNQRIWQAAHYQLVASARAVKLGKSINPEFQFGGMLVVSRNYSQNLDSAIDAMEAEVKNRENYVFTDVQVRGSYPNHFLRRLEREQIALDIENDDFFDLRVGKVDFVSFSYHASSNSQEVFINKYGYNNTNKNPIDPVGLRLAMNNLYDRYQKPLFIVEDDLVLDESDSRSIEELKTNIQEIVKTVEYDGVELLGYTPLSWVDLNF

SEQ ID NO: 197 - protein, 732 aa, Cellulosilyticum lentocellum
MSEKDARLINKLLEKLTLEEKIGMIHGASLFRTKGVERLGIPSLKMSDGPMGVRMEFADTEWRAVGNTDDYVTYLPSNSAIAATWNRELAGKAGEVLGEEARGRGKDIILAPGINIKRSPLCGRNFEYMSEDPYLVKELTVPMIRGIQKYDVAACVKHFIANSQETQRLWVDTLVDERTLQEIYYPAFKDAVKRANTYSLMGAYNLLNGKHCCENEKLLDEVLREQWGYDGTIVSDWGAVHNTQAAAECSLDVEMNITNDFDDYCLAKPLLKKVKSGEIDELCIDNKVKNILRMMLRLHMIGDQVEERKAGTYNTKTHQEAVLEVARESVILLKNDNNELPLKKKGLKKIAVIGQNAVQIHSNGGGSAEVKALYEISPLMGIKKILGGNAEVVFAEGYYIPKRCEESDQNWQATSIYDKSLEIADITGENIGGNSEDRIEERRKQIQDQLREEAVALAKEVEVVILIGGLNHDYDVEGLDREHMRLPYEQDALIQAVLEANPHTIVVIYAGAPVEMPWIEQADSVVWSYYAGMEGGTALAEILWGEVNPSSKLPETFIKKEIQCPAHFIGEFGNKDVVAYKEGIMVGYRYYDTYCTDILFPFGYGLSYTEFLYDDLKVQLLEKENELSVIVEASIKNIGNLEGAEVVQLYIVDVEASVERPLHELKAFEKINLKPEEVHKIQFVLNEEAFSFYSIEDRCFRIEDGAFMIQVGSSSRNIHLEEEIIITRNYFK

SEQ ID NO: 198 - protein, 466 aa, Streptococcus gallolyticus
MATYTFPENFWWGAATSGPQSEGRFNKKHANMFDYWYEIEPEVFYDQVGPDTASNFYNSYKEDIALMKKVGLNSVRTSIQWTRLIDDLETNTVNQDAVDFYNNVIDCFIENGIRPIMNLHHFDLPVELYHKYGGWESRHVVDLYVGFAEQAFKAFGDRVKDWTTHNEPMVVVDGEYLYQFHYPKLVDGKKAVQVAYNLNIASAKAIAKFRELGLDKDGGRIGTVLNLTPTYAASDSEDDQAAAHFAELWNNKMFLEPAINGHFPEELEAVLEKDGVIWQTEPEDAEIFKNNTVDFLGVNFYHPNRVKAPDIAPNSVGAWLPSRYYDEYNMPGRRMNIDKGWEIYPEAIYDIAINIRDNYKNIPWFVSENGMGVSREERFMDESGQVQDDYRIDFIKEHLACLHRGIEEGSNCFGYHLWTPIDCWSWMNAYRNRYGFISNNIHTQIKTIKKSGEWFKQVTVDNGFEE

SEQ ID NO: 199 - protein, 792 aa, Ketogulonicigenium vulgare
MTRDVTETLLDQMTLEEQVSLLAGETYWRTPEIARIGLPAIKVTDGTNGARGEAFSNGARTAAYPAEVALAATWNVDLVHEIGVDLAAEVRAKKAHIILAPAVNMHRNPLNGRNFENFSEDPHLAARMAVAFIKGVQSQGVGATIKHFVGNECEHERRSINSAIDEKTLREVYLPPFEAAVREARVTCVMTSYNWLNGVHTSENQWLIGDVLRGEWGFDGIVMSDWLGTHSTEAAIEAGLDLEMPGPGKHRGEKLVAAVREGRVDAQKVRASAGRIIDMGQRLGTDIADDLSDETAIDRPATRALLRKAAAESTVLLTNRGGLLPLAAPQRIAVIGPNAAVAVIHGGGSAQINAHYAVTPLDGLRAALPDAQVDYALGAAAERFVPAITGAVTIALFNGESRDGAPALVQQAPDTAFAWFGAVAPEVDHSAFAARITCTLTATQSGPHEIGLMSAGLSKLYIDDVEVLDAWETWQKGESYFGHGSDERRGVIDLVAGQTYAIRCEYFCGDGIATSLKAVRFGLRAVSQKGDLDAACRIAAAADAVVIVTGLSPEWETESEDRRSLSLPPGQDAMIAAIAAVNPRTVVVLQAGAPLAMPWAHNVGAVLQQWYPGQECGNALADVLLGIQEPSGRLPQVFPASDDQITAVTERPARGGTVTYAEGVAIGQRRFDALGLKPLFPFGHGLGFGQVEYLDAQALDGLCVQVRLANHAERATQEVVQIYHNLPNGQRKLLAFAKVVVPAGAEVSATLKIMPEGFRVWDGGWTYPYRTADLAIGRSGADIRLMLAITLE

SEQ ID NO: 200 - protein, 651 aa, Spathaspora passalidarum
MTAYNKVNGVHVSESKAILQGILRNEWKWDGCTMSDWYGTYSTKDSLDAGLNLEMPGPTRFRQVLQTVHQVQANLIHPKVIDDNVRQVLKLINQGLKAGIPADVIESPNNSPESSKTLRKVGDESIVLLKNEESILPLSKTAKETIAVIGPNAKASQDSGGGSASLTARYKTTPYGGIEEKVKEGNNSIKLEYALGAFLDKNVPDSAAILESESGKKGLITARFYHTAPGTPDRKPFDELSLNTTRIFLNDFKSDNLSLEQLLYYADFSGYFTPEESSEYEFGCSTFGSAQVFVDGKLVVDNKTKQVKGDAFFLAMGTREERGSIYLEKGKKYLVKVEFGTSPTYTLANGSQEPGGVYFGVRIKSSPEDELAKAVKVAKSADKVVLVVGLSKEWESEGFDRPDMDIPGYTNKLVEEVAKVNPNIIVVNQSGSPVTLPWVDKTKALVHAWYGGNELGNTIADVLFGDYNPSGKLSVSFPKRLEDNPSFVNFGSNKGQVWYGEDVFVGYRFYEKVGREVLFPFGFGLSYTSFDFKNLKVDTTEDSLVVKVDVTNTGKVDGAEAVQLYIEQANPSINRPVKELKDFEKVFLKAGETKTVELEVSIKEATSYWNSFVNQWQSDKDTYKVLVGNSSDNILVKDEFTTKKTFTWSGL

SEQ ID NO: 201 - protein, 744 aa, Niastella koreensis
MNRIYLTFCFAIGLSVIHLKATAQKKTIDQRVDSVLKLMTLDEKIGQLNQYSSKEELTGPAGENSNIAQEIKAGKVGSMLNVRGADRTRRMQELAMQARMKIPLLFGQDVIHGYKITFPIPLAEVASWDLTAIEQGSRIAAIETAASGVHWTFAPMVDIARDPRWGRVMEGAGEDPYLGSLVAKARVKGFQGKGLGNLDAIMACAKHFAAYGAAIGGRDYNSVDMSERTLWEVYLPPFKAAAEAGAATFMNSFNDLNGIPATGNAYLQRDILKGRWKFPGFVVSDWGSIGEMVPHGFVKDKKEAAESAIKAGSDMDMESRSYTAHLAQLVKDGKVPVALVDDAVKRILRKKFELGLFDDPYRFSNVQRETATVGIPQHREVAKDMARKSIVLMKNEKGLLPLSKTTKTIAIIGPLAKSEDDMLGFWSVGWPDNSDVVSQWEGIQNKVGNNAKLLYAKGCDVSDTSRAGFAEAIAAAQNADVVIVSVGERREMSGEAKSRANIHLPGVQEELLQALQATGKPVVVLINAGRPLVFNWTADNMPAILYTWWLGSEAGNAIADVLFGDYNPSGKLPMSFPRTEGQIPIYYNYFNTGRPAPDDDNPARYRSGYIDLQKSPRFAFGHGLSYTTFTYSDLQLSKPAMSAGDSIVVTFKLTNSGKVAGEEVAQLYLRDEIASLVRPVKELKDFKKLMLQPGETQTVRFVIKKDKLSFYNQQLQWVAEPGDFDLMIGGASNDIKLKGKFELK

SEQ ID NO: 202 - protein, 799 aa, Unknown
  Cellvibrio sp.
MLKTDGTKWVKASGRQVHLKGTNLGNWLVQEFWMMGQGGNGVHDQCTLEAELTERFGYDEKERLIKLFRDNWIKERDWDQLQAFGFNVVRLPILWNVIEDEKNPKTLRADAWHYIDWAIAEAKERGMYVILDLHGALGGQTPNDHTGCSGQNQYWTNSEYQDRTKWLWEQIATRYKDEPVVAAYDPLNEPWGSTPEDMAERVLELYDTIRAIDDKHIIMLHSHYGSIDVYGDPAEQGMTNVAFQLHPYPGLFGDRPNDSHYDIHRDWLKCGQDGKGGVCFWDTKLEELQTPMLMGEFQPWQGAGLELGGKIGRATYDIFAGYDWASTSWSYKLVTIAGGQGNGLWGMVTNEINTSLDTGVGMITKASTWDCNNWDSSFAEACAKKATTITTGGTEDKTYYLVIKTGANGGASPDVTFDSISLKNTATNEELIANGNFGAAGGWSELTISGALNFNYNNTDTSKAPTGSDGAVLHITRPSGVEGEINGALYQQITLKGGQTYNFSGVFKGNGSTNTWAEIYLIEEEPVAGKDVVDSAGKVDFTTAPIEEIEALFTSYGEVGYDVHEGLAHWLVTDEHNDVFDYPDRPTGLALTVTGTNASLTWTATPGTDISYNVYRSNSAGSKGTLIAEDLAVTSYADSNLSEDQTYYYSVTARNNIAESYASDAVNTPILFTPVPAKIEAENYTAQSGSQSENTGDSGGGQNVGHFEAGDFVEYKIKVETAGNYIIEYRLASQTGSTGFNALIDGAIVDTQTLAPTGGWQTYITQSSGAIALQPGNYTLKLSSIGKEWNLNWINIKAQ

SEQ ID NO: 203 - protein, 450 aa, Unknown
  Flavobacterium sp.
MNKIESSFLNRNQFGEDFLWGVSTAAFQIEGAHDADGKGSSIWDVFTSQKGKIKNGHHALTACDFYNCYEDDISLIKELNIPNFRFSISWPRIMPTGIHPINQAGIDYYNKIIDSLLSSGIEPWITLYHWDLPHELEVKGGWTNRESVSWFKEYVEVCVQYFGDRVKNWMVINEPSVFTGAGYFLGIHAPGKKGITNYLKAMHHVTLATSAGAKIIRERIPNANIGTTFSCTHIEPATESSKDVEAAKRVDTLLNRTFIEPILGLGYPQKDLPVLKKLNNYILEDDLNNLNFDFDFIGLQCYTREVVKSSILTPYIGAELISAEKRNVISTEMGWEVYPPAMYHILKKFNEYNGIKKIIITENGAAFPDTVQNGKVHDIKRTHFIQDNLEQILKAKNEGINVDGYFVWTLTDNFEWAEGYNARFGLIHVDFETQKRTIKNSGLWFKDFLS

SEQ ID NO: 204 - protein, 625 aa, Macrophomina phaseolina
MKKILRDEWKYDGMVMSDWTGTNSVAEAIAAGCALEMPGPTKWRGERAIRAVEKGELSAADVERAAGDVLYLIQRTKGFNNDAPEPDERANDNPAIRQVIRQAGAEGLTLLKNERGLLPITSAKKIAIIGPNAKRAIAGGGGSASLNPYYTTTPFDGLANHFEGELIYSRGCDTAKWLPLASPFCTTVDGKPGVTLEYFCQDRFEGAPASVQHKANTDLFLWDSAPKAVLPAYSFKVKTILTPKTSGTHTFSFSSVGPGRLFLDGELFIDNWDWTEEGEAMFEASEDVIQSIYLEEGKPVRILVESTNEVRPASKITHGRPTHAYGGCRIGYEEESRINLLQEAVDAAKKADAAVVFVGLDAEWESEGYDRQTMDLPKNGSQDRLVEAVVAANPNTIVVNQSGTPVTMPWSERVPAILQAWYQGQEAGNALADVLLGRQSPGGKLPTTFPKKLSDNPAYHNWPGENAKVVYGEGIFIGYRHYERCGIEPLFPFGHGLSYTTFCYGDAIISSRTLEAGGVVKVSVPVTNSGGFAASEIVQGYIRDIKSKLPRPEKELQAFGKVFLQPGETKTVHLLFDKYSVGYYDTSLEAYIAEEGRFDVLVGSSSADIRCSTSFEVLESFTWVF

SEQ ID NO: 205 - protein, 453 aa, Kosmotoga olearia
MPENRVSAEDFPEGFLWGVASSSYQIEGADLEDGKGPSIWTEYTKYKDNIVDGESGMIACDHYHRYTEDIFLMQDLGANAYRFSVSWPRIFPDGYGKPNPFGLDFYDRLIDNLLEAGITPFLTLYHYDLPLKLQQEHRGWESRETISYFLEYAHFLFKKFGDRVKYWITLNQPLRISHRSYIDGKAAPGKGKSPKDSFQVAHHLLLAHAGATKIMKQEIPDGKIGISNSSIYVEPIEDTPEHKRAALLLDQFYNDWFYLPPVSGKYPEELMLELKKRGWAPEMEPDDMDNIVAEQDFWGINYYTRALAIQSNNSLLGFAQASPKFPATRRGAEIYPCGLFLVLKKIHKNFDSKQIYITENGMDLDSPVASGKLEDTERIIFLKEHIVQLKKAVDSGIPIKGYFVWSLLDNFEWTSGYTLKFGLVYVDRNNGLKRIPKASYYFYRDFIAGKISL

SEQ ID NO: 206 - protein, 820 aa, Blautia obeum
MKVGWKTVMKQQKLVEKMTIEEKAAILSGKTVWQTREIDRLSIPSIFLSDGPHGIRKQAGAGDHLGLNASLKATCFPTAATIANSWNQDLGEEIGQALGEEAASMDVNILLGPGLNIKRSPLCGRNFEYFSEDPYLSGKMAASYIRGIQSKGVYACPKHLAVNSQELRRMAMDAIVDERTLREIYLTGFEIAVKEGHAKAIMSSYNQINGIYANEDKHLLTDILRKEWGFDGIVVTDWGGSNDHVKGVAAGSNLEMPSCGYDSAREVIAAVRNGKLKEADLDERVGELVDAVMELTSGKKLSDKNFDRNAHHQLARKAAAESMILLKNEKQILPLDTKKSIAVIGDFAFSPRYQGAGSSMVNPTKVEDMSSILQQYDLNILGMTRGYQRNGDVDENDRKFALNLAMNADIVIFCFGLDEISESEGLDRTHMRIPQDQIDLLQDISKVNENIIGILSAGSAIEMPWHTCCKAILHGYLNGQAGASATLDILTGKVNPSGRLAETYPISYEQTPAFRYYPSNEKTSEYRESVYVGYRYYDTSKVRVQYPFGFGLSYTEFTYSDLIIEEDGIKVSVTNTGDRDGAEVVQMYVGLPNAIVFRPEKELKGFAKVYLKAGESRQLRIPFDDKTFRYWNIKTGQWEIETGTYQIMVGASVADIRLTGMTERTGNSKGYPYNPAKMPYYYTGIVQKISDEEFRELLGHEIPNRRWSGNLEINDAICQMYYAKSRLARLIYRCLTKMKKKSEAQGKPDLNILFIYNMPFRGIAKMTGGAVSMEMVYGIVDAVNGHFMLGVKKIVGGYFRNRRNNKKYEKLLKGAGGKCR

SEQ ID NO: 207 - protein, 748 aa, Bifidobacterium dentium
MSESTYPEVNDLTLEEKASLTSGGDAWHLQGVEAKGIPGYMITDGPHGLRKSLASSTGETDLNDSVPATCFPPAAGLSSSWNPELIHQVGEAMAEECIQEKVAVILGPGVNIKRNPLGGRCFEYWSEDPYLAGHEAIGIVAGVQSKGIGTSLKHFAANNQETDRLRVSANISQRALREIYFPAFEHIVKEAQPWTIMCSYNRINGVHSAQNHWLLTDVLRDEWGFEGIVMSDWGADHDRVASLNAGLNLEMPPSYTDDQIVYAARDGRIQPEQLDRMAQGMIDLVNKTRAAMSVEGYRFDVDAHDEVAHQAAVESMVLLKNDDAILPVASDAKVAVIGEFARTPRYQGGGSSHITPTKMTSFLDTLAARGVDAKFAPGFTLDLEPADAAMAADAVEVAKGADVVLMFLGLPEAAESEGFDRETLDIPAKQVELLEAVAAENKNIVVVLSNGSVVSVAPWADNAKGILESWLLGQAGGPALADVIFGNVSPSGKLAQTVPMDINDDPSMINWPGEEGHVDYGEGVFVGYRYYDTYDKAVDYPFGYGLSYATFEVSDVKVAKTGANTASVSAVVKNTSDVDAAETVQVYVAPGKSAVARPIHELKGFRKVFLKAGESAEVSFDLDERAFAYWSEKFDDWHVESGEYAIEVGTSSRDIAGTGVVELDGDGKAEPLTEWSTFGEWSDDPVGSKIVASVYAEGEAGNLPKMPDNDMMRMFLRSMPINSMPMLMSEGGKKITAFMLDEYAKVTE

SEQ ID NO: 208 - protein, 822 aa, Anaerolinea thermophila
MNVHNQDTIEQKISELLSQMTLSEKVSLLSGKDAWRTMPIPRLGIPSITMTDGPHGVRSSYPEAGRKAGPTTCFPTGVSMAATWNTALIEKVGMALAEETRAMDCDILLGPCVNIVRHPLAGRNFESYSEDPYLNGKMGVAWVKGLQSKKVGASLKHFAANNQEFERHRGSSELDERTLREIYLPHFEMVVKEAKPFTVMCAYNRINGVYASQNRHLLREILKEEWGFDGVVVSDWGANHTIFESVENGLDLEMPGPARYYGKLLEDAVHNWQIDEKVIDDAVRRILRILFRAGKFDDPATLPPGSVNTPEHQALALEVAEEAITLLKNEADLLPLDIEKIRTLAVIGPNAAEDRIGGGGSSYVDPPYRVSPLEALRARFGDKIQIEYEKGCDNYHQPPVLGADWLGVNGLKVDFFDNPALQGQPAGTISIPKAEMWMWANSLPASKITSPRFSLRASGSFTPLESGNFTFFLVNTSTCRVFINGNKVFENTSKPKEHRAESEVQFQTTLEEGKSYDLVIEYLKDNDEEFAFWKLACMRVFGPGEDNRIQKAAELAAKSDVALVFIGMPEGFESEGYDRPDMRLPGPQDELVRAVLKANPRTVVILNAGSPVEMPWAEDVPAILEAYYPGQEGGNAVAKILFGEINPSGKLTVTFPRRLEDTPAYINYPGDRKVYYGEGIFVGYRYYEKKKVSPLFPFGHGLSYTTFEYENLTLPSEVNIGESVKVQVTVKNTGKRAGKEVVQLYVGDPESSLVRPPKELKGFAKVELQPGESKTVSFELDERAFAFYDPYQSRWVVEPGEFQILVGSSSQDIRASAVLRMA

SEQ ID NO: 209 - protein, 464 aa, Coriobacterium glomerans
MNARSPFFWGSATASYQCEGAWNEAGKAESLWDRYLHEAHLENGDVASDHYHRYREDIELMAKGNQNAYRFSLSWPRIILNREGDVNEAGVEFYSRVVDACLEFGIEPYVTLYHWDLPQYWQDEGGWLNPAVADAYVRFARVCFDRLGDRVRYWATFNEPKWFVASGYLIGNYPPGLNDPQLAIRAAFNVMYASACCVQVFRDGRFQGEIGIVHSFSPVDGIDETLETRIAMRYADNYCNNWIMDTAAKGEIPIDLLADLNKRYDLSFMSSRQLDVIADNTVDFLGLNYYSRTLVKPYTRGETSIVVNNTGASFKEKPRVVLKDWFEQVLDDPGMEVTAWGTEIYPDGLRRGLLDVYNRYHLPIYVTENGIGVVEEINAEPIDDEYRISFMRSHIEAIKAAMHEGADVRGYFAWSSFDLYSWKNGCEKRYGLIGVDFDRDLRRIPKKSFGWYRDFIARESTAEK

SEQ ID NO: 210 - protein, 743 aa, Microlunatus phosphovorus
MPVGGRTFESYGEDPLLAGAIGVEMVRGVQAQGVQACAKHYAINNQEDHRSSVDAVIDERTMRELYLPPFEALISEAEVASMMGSFNRVNGAFACENPTLLTDLLRNTFGFQGWIMSDYGANHSTADAANAGLDQEQPNEGFWGSKLLEAVRNGEVAESVIDDKVRRILRPLIGMGQLENPVGIAEFAVDDHHEVARRVAEAGTVLLRNDGLLPLGEVRSVALIGPDVDGVGAQGGGSSMVRATKGTSPLDGLAAALGEDVEITVAYGSDPVTPGALLPGPDAIPSSFFRTPEGERGLRAEFWTNPDFGGDPFLVRNDGQVELNMGFHNFPGFNAASPRYDKLPGDLNAQISARWTGSLVVPTTGTYQFAITSLGSYAFSIDGKAVSSSGNLAVATEVEAAEPAEPKPYGWGGDAAENPTVEELTLELEAGKEYPIRLDYAANHPSQGFLLGARFRLGWVPPAGVYSPEVTEAAELAAKSDVAVVVVRTYEAEADDRPHMGLPSGQDDLIKAVLAANPRTVVVLMTGAPVDVTRWGQEPAALLQAWFPGQAQGEALARVLTGEVEPGGRLPLTIPASLADTPAADPRTYPGVDGQVHYTEGVFVGYRAVTADGPAPSYPFGHGLGYTSFDFSDLAVEAADGDDVATVSVSVTNTGGREGSEVVQVYVGELPAPVPTPARQLAAFAKVKLAPGESERVSLSVPRRKVSYFDVETHDWATPAGEVEIGVGASSADIRLTGAIQVA

SEQ ID NO: 211 - protein, 763 aa, Unknown
  Streptomyces sp.
MGLKPPYLDPALPVAERVADLLGRMTLPEKVGQMLQLNAKEGVRHLVEDLHAGSILHASPERVSQAAELTARTRLRIPLLVAEDCIHGHSFWEGATIYPTQLGMAATWDPELVERIARATAVEVAATGVHWTFSPVLCITRDLRWGRVSETFGEDPFLIGELASAMVRGYQGEGLDDPTAILACAKHFAGYSETQGGRDASEADISRRKLRSWFLPPFERVAKEGCRTFMLGYQSMDGVPITVNNWLLNEVLRGEWGYTGTLVTDWDNVGRMVWEQKVYADYAQASAAAVRAGNDMVMTTSNFFAGAQEAVAQGALTEAEIDAAVRRILTLKFELGLFEDPRHPDAARQAEVIGSGAHAALNLEAARRSLVLLTNDGTLPFAGGLVADEAGRGRPLASGSPRTVAVVGPNADDAQTQLGDWAGSSGQADWLPEGQPRGMIRTVLDGFRDHVPADWTVAYAPGARILDVGPDPEGAFFPDGQPRPEVVVPAAPDPRLIAEAVAAAEAADHVVAVVGDRIELIGEGKSTATLELVGDQVALLDALAATGKPFAVVVISSKPLVLPPSALDAAAIVYAANPGMLGGRAVAELLLGLIEPTGRLPLSFARHAGQQPTYYNQVRGQHGSRYADLTQRPAFAFGEGLGYTTVDYTDLEVLTSVVDESETVRARVTVANTGARPALETVQVYVSDTVTSVTWAEKELKAYRQVALAPGESREILVELPAADCTLVDAEGRRVVEPGRFELMVGPSSRDEVLLRGEFTVKG

SEQ ID NO: 212 - protein, 814 aa, Spathaspora passalidarum
MSITEKVNLTTGTGWGSGPCVGNTGSIPRLGVPNLCLQDGPNGVRFTDFVTHFPSGLAAAATFNKGLMYLRGKAIGKEHKKKGVHIALGPTIGPMGLKAAGGRNWESFGADPYLQGVGGAATVEGMQDEGVLATARHFIGNEQEHFRQVGEWEENGWDKLESAISSNIGDRAMHEVYLWPFADVVRAGVASVMCSYNQVNNTYACENSYLLNFLLKEELSFQGFVVSDWGAQHSGVNSVLAGLDMTMPGEVFDDWLTGKSYWGALLTRSVYNGTISQKRLNDMVTRILAPFFAIESVALPTEEDVPNFSSWTHHTYGQEFPYQHFGPIVQKNWHVDARSEFSDNTALTVAREAIVLLKNSGHHLPIDKGSGIRRILVAGKGAGPDPNGFNCRDQRCVDGVLTSGWGSAAVNNPFVITPYEAIAQKARDRGIMIDYSSSVWDLDNVEDLADYADLAIVVVNTFSGEGYVYVEDNFGDRQNLSLWHNGDQLIETIADKCKKTVVVVTSTGPVSMEKWIEHKNVVAVIFAPPLGQFVGQAIADVLFGDTNPSGKLPFTLARKKQHYVPIIDDLGGDRNPQDNFDRDIYLDYRFFDKHNIKPRFEFGFGLSYTSFKVCNLKITEINPPSEYLPYPQEYLPIYKLVEDDVCDPEDALFPHDEMDPAPGYIYPYLYNENVRSLDDQDDYEYPRGYDPDQPTAPVLAGGGLGGNPALWEVLYEVCAEVTNEGKLKGGYVSQLYIEFPSTILPSPPRVLRGFEKVFLEPGKSAKVYFNILHRDLSIWDPESQQWIIQTGTYKIYLSSSSRKVELCGEIDIGC

SEQ ID NO: 213 - protein, 717 aa, Glarea lozoyensis
MTGTVDVEDVLSKLNNVEKRLGIPAIRMSDGPNGVRGTKFFNGVKAACFPCGTGLGATWDVDLLRQAGQLMGDESKSKGSHIILGPTINMQRSPLGGRGFESLSEDPVLAGLGAAALTAYNKVNGIHVSENDKILKGILRGEWGWEGMVMSDWWGTYSTSEAINAGLDLEMAGPTRWRGMALQQAVSVGKVHQHVLDERVRNVLNLINRVSAAKIEEYAPELTADTPETAAFLRKIGGESIVLMKNEDKILPLSKDKKTLILGPNAKYAAIHGGGSAALAAYYAVTPFEGIKSQLTSDPLYTVGCYSHKELPLIGDILKTANGETGISFKAYNEAPNVPDREIADELVLTKTELLMMDYNCSKLKSDLWYGTIEGTYTAEEDCDFEFSLGVYGAAKLFVDDKLLIDNDTVQRKGTMFFNCGTAEEKGTIPVKKGQAYQIRVEFSSAPTSKLDPGSNTLFGSGAVRIGGAKVIDAEEEIKHAAALAKNTDQVIICAGLNSDWESEGNDRDNMALPGYMDALITAVTAANPSTVVVMQSGTPVEMPWISSTKAMIHAWYGGNETGNAIADVLFGKVNPSAKLPLSFPKRLQDNPAFLSYKTERGRVLYNASLKVSVKVSNTGDLPGAEVIQVYVSQKNPSIKRPKKELKGFKKVYLEKGESTTVEVEIETKYATSFWDEVRDSWIIEKDTYDVLVGSTSEKIQVKGEFEVGKTSWWKGL

SEQ ID NO: 214 - protein, 848 aa, Glaciozyma antarctica
MTTPLRQDLRRRRPRIALSPSPSYPDSTPPSPRSWGIRTHLMAPLLPALVVLYLAVSTTSTSLRTRSVQDGVPDGAPPGFEQYISPIIVPSPNISGSGGWAPALKKARHFVDQLTLPELVNLTTGAGILNRCVGNTGTVERLGFEGICLEDSPLGVRFADFVSAFSAGINAAATWDKNLIRRRGVAMGKEFRGKGVNVALGPMMNMGRAPAAGRNWEGFGADPYLTGVASVETIEGTQSQGVIACAKHWIGNEQEHFRGGSGSQTSSSNINDRTMHEIYMWPFAESVRAGVGSVMCSYNRLNQTHACENSMINNGLLKEELDFQGFVVSDWAAIVSGVSTALGGTDMNMPGFYAYTNLEDSQSNPAVSNTSYWGAALVEAVNNGSVPLTRVQDMVMRTMAAYYKLGQDKDFPAVNFHQLTQDTYLNGELVNEHVNVQRDHRKLIREMGAASTVLLKNERKTLPLDAASFARWGFFGSDAGPGENGPNGCLDRACSEGTLAMGWGSGTANFPYLVDPYSALQTFIHSVKNNAVIEAVLNDYSPQVATIASLADICLVFANSNSGEGFATVDENAGDRNNLTLWHSGDDLIANVSSRCSNTVVILHTVGPVIVESWIDHPNVTAVLYAGLPGQESGNSIVDVLFGGVNPSARLPYTISKAREDYPADILYTAPSDVVPQLSYSEELLLDYRWFDAKSIAPRFEFGFGLSYTSFDYTKLSIKPSGFHRRSKQVWENWNDESNAPGGPPGLWEDVVQVEFTVRNTGGVDGNEVSQVYLGFPEGAGEPPKVLRGFERTFLKKGAKTTVVVKLNRKALSIWDVVKQAWAVPKGDFKVFVGQSSRKIVLTGSFQQ

SEQ ID NO: 215 - protein, 794 aa, Unknown
  Arthrobacter sp.
MDQTLPAPARANLLLAELSLDQKMAQVSCYFPTDIAQTDDFADRFPFGIGEVSCLEARSALTLNEVTEFQHRIQSAAMNGSGHGIPAIFHMEGLCGAYLPGATSFPSGLGRAASWDVDLELRVGEIVGRQERALGITHTLAPVLDVSRDPRMGRHGESYGEDPTLAAALGVSYTLGLQDQDSAGRRTEAVAKHFVGSHHTEGGIHGTHCNIPERTLLEVYGKPFQAAITWGGLRGVMPSYNSVGGEPVSASHRLLSTLLREDMGFDGMVVSDYCAVGNLHTVQRVAESWAHAGLAALSAGMDVELHVPQGFGPELRDWFAEGRADVALLDRAVHQVLTAKFRMGLFEHPFAPDARDRDSSFRAESDSAVALQSARESLVLLSNDGVLPLAAGTGKLAVIGCHAATARFFFGGYTHYSMAEGMLAVNSSMAGLATRSDDLKAIANNLPGTTIEASDGTAFEALLQRQQPGIRSLLDELRLRMPDTEVEWAAGYPFAGDDDSGHDDALALAARADVVLLTLGGKHGTASIASMGEGIDATNINLPSCQEDLIVKLSQLGKPLIGVHLDGRPISSDASDKHLDALVEAWSPAEGGAQAIVDILTGVHSPSGRLPVSIARNAGQVPVYYNHPYGSSWHQGESVGFPEYVDAPHAPRYPFGHGLSYTTFEYGGLSFSAHKVGGDGSIDLSFTVTNTGERYGTEIPQLYIRDTYGSVSRPVLELAGFRRVGLEPGQTAQVDFTLDITQLAFLDANMEWRVEAGDVDIMIGASSEDLRLTGTVTIASDAVIDGRTRSFYAK

SEQ ID NO: 216 - protein, 846 aa, Fusarium pseudograminearum
MDESNAPSTPDTEFSPPCSPPQKIQYLRDTRSAAKEKLSLLTLEEKVSLLTAADFWRTKAIPEKGIPSIKTTDGPNGARGGIFVGGTKAALFPCGISLAATWNKDLLYQVGQHLAQEVRARSAEMLLAPTVCMHRHPLGGRNFESFSEDPLLTGKLAAQYIKGLQDRGVAATIKHFVGNEQETNRLTIDSLITERPLREIYLKPFEIAVREANPWAVMSSYNLINGVHADMNKHTLKDILRGEWGYEGTVVSDWGGVNSIVDSVEAGCDIEFPYSPKWRLDKLIVAVNEGRMSIETINQAAENVLALVERLKGGDMSPEQPEREDDREETRQLIRAAGHEGLTLLKNDHGILPLCPKSTKVAVIGPNANRHIAGGGGSASLNPYYNTIPLDSIRKASQQKVSFAQGCHIHKWLPVASEYCTEKSGKPGVHIDWFAGDKFEGSPVVKQRRTNTDLFLWDSAPLNQVGPEWSAVATTYLTPKTTGKHTISFMSVGPGRLFVDGNKVLDLWDWTEEGEAMFDGSIDYLVDVDMEADKAVELRVEMTNELRPISKQKQFGITHKYGGCRIGFKEQDRVDYIQQAVETARDADVAVVIVGVDAEWESEGYDRQTMDLPADGNQDRLIEAIVKANPRTVVVNQSGSPVHMPWVDRVPVILQGWYQGQEAGNALADVLFGIENPSGKLPSTFPKRIEHTPAWHTWPGENHKVLYGEGLYIGYKHYDHAKIEPLFPFGHGLSYTTFEYGRPEISTRTLTPNEEITITLAISNTGSRAGSEIVQLYVHDEKSRLPRPEKELVAFEKVYLEADETRHISIKLDKYAVGYYDETVPGWIAEEGVFQVLIGASSTDIR

SEQ ID NO: 217 - protein, 744 aa, Hypocrea rufa
MRYRTAAALALATGPFARADSHSTSGASAEAVVPPAGTPWGTAYDKAKAALAKLNLQDKVGIVSGVGWNGGPCVGNTSPASKISYPSLCLQDGPLGVRYSTGSTAFTPGVQAASTWDVNLIRERGQFIGEEVKASGIHVILGPVAGPLGKTPQGGRNWEGFGVDPYLTGIAMGQTINGIQSVGVQATAKHYILNEQELNRETISSNPDDRTLHELYTWPFADAVQANVASVMCSYNKVNTTWACEDQYTLQTVLKDQLGFPGYVMTDWNAQHTTVQSANSGLDMSMPGTDFNGNNRLWGPALTNAVNSNQVPTSRVDDMVTRILAAWYLTGQDQAGYPSFNISRNVQGNHKTNVRAIARDGIVLLKNDANILPLKKPASIAVVGSAAIIGNHARNSPSCNDKGCDDGALGMGWGSGAVNYPYFVAPYDAINTRASSQGTQVTLSNTDNTSSGASAARGKDVAIVFITADSGEGYITVEGNAGDRNNLDPWHNGNALVQAVAGANSNVIVVVHSVGAIILEQILALPQVKAVVWAGLPSQESGNALVDVLWGDVSPSGKLVYTIAKSPNDYNTRIVSGGSDSFSEGLFIDYKHFDDANITPRYEFGYGLSYTKFNYSRLSVLSTAKSGPATGAVVPGGPSDLFQNVATVTVDIANSGQVTGAEVAQLYITYPSSAPRTPPKQLRGFAKLNLTPGQSGTATFNIRRRDLSYWDTASQKWVVPSGSFGISVGASSRDIRLTSTLSVA

SEQ ID NO: 218 - protein, 787 aa, Ruminococcus torques
MEIKYLYQDEKQTPENRAQDLIARMNLEEKINQLSGEIVMDQIPEGTLGHGIGELVVYASKGSMEETAEFINTIQKKIINNSRWGIPVIVHAEALCGGVVAGMTQYPSPIGLGASFMPELVEKMAENIKNEMRNVGIRQVLSPVLDLARDFRWGRTNETYGNDPTLVSAFGCAHVQGMQTNDLRKGVIATCKHFLGYSSPEGGINTARTQTDNGDLRENFAKPFEAAIRKAGLKSIMNSYSEYDGETICASKHILTDLLRDDLGFDGAVVSDYSSLIRIKDNSRMAEDYQQAGILALKAGIDVELPKAVCYGSNLLQAVKEGKIEEKYVNTAVKRVLKLKFELGLFEKPYCEYKELDCLKCYQLSEKMTEKSITLTKNDGILPLTDRKIKVAVIGPTGDNLRMLSGCYSVAGSIDMIFSGMSQEGVDNETAVTVPDKYKKMSPEISAKIDRIIRQIYPMSKTIYEAIKEYYPETEYVEGCDIGDNIYYDKEKAVAAAKKADIVILTLGGKNGWGSNCTDGEGLDNTSIGLPGRQEKLMREVYNVNRNVIIIHTDNKPLVNTFAYDHIPAIIEGWLPGIYGGEVLAKCVAGIINPGGKLSVDIPRSTGQTPVYYYQQNGSRSDSPMYGLNKHGYLNESCCSVRPFGYGKSYTSFTYKCQNMNVDEELGLPLLTFEVEVSNIGEMEGDETIQLYGIDEYASIIRPQKILLGFKRVTLCPGETKKIIISFRLDQMAFPDKCGNWILERGRFIFEIGYSSRDIIDTYEYTLESSIDIDHTKRPFFAEAYVI

SEQ ID NO: 219 - protein, 809 aa, Bifidobacterium dentium
MELEELSVVEKAAMLSGGSEWDSRGNSRAGIPSFVMSDGPHGVRRQLGEGDHLGIGASKPATCFPTAGTVANSWDPALAEEMGEALGKEAHDLDVNVLLGPGMNIKRNPLCGRNFEYYSEDPVVAGRMAAGLIRGIQSNGVSACPKHFAVNSQELRRQASNSVIDERTMRELYLTGFEIAVREAGPMTIMTSYNEINGIYAHENKHLLQEILRDEWGFDGMVVSDWGGSNSAVAAVKAGGSLEMPSPGFTSVRELEGAVRAGTLSEADLNARAAEVAKIAVATKLVGVGRDDLLKDDIAAAHHEVARKVAENASVLLKNDNAALPFKPGTRVAVIGDMAATARYQGSGSSKVNATREENILEEVKNAEGLRLAGYEPGYDRQGAIDRGLIEDAIALAGKDSVDVVLAVIGLDERSESEGLDRSTMAIPQVQNDLIAALKGTGKPIVVVLVAGSPVELPWMDDVVAVLYVGLSGQAGASATVRALTGEVNPSGHLAETWPLVYGDCPSAGWYPAIGRDAIYREGPFVGYRYYETADVPVRFPFGYGLSYSDFTFSDLSADDNGVTFTVTNDSDIAGATVAQLYVRGPQGGVLRPDRELKGFVKVWLDAHESKKVTIPFDRYTFRHFDVAANVWRTESGTWTLLVGDNAEHLPLSVAYAVVGDMGVTPANPALGGYLTGHVKDVTDTEMAVLFGHEVIAPGKPMTFGVNDPIMSWAGSKGFVARTIAKTLTKQEAKIRQKTGSPDLNTLFVLNMPPRAMSKMTQGRIDSAMVDAIVKIANGHTFRGLGGVIAGYFRNQSANKRTAKELNND

SEQ ID NO: 220 - protein, 740 aa, Bacteroides salanitronis
MKTFIFNLCIGTALSICTTYGQTAETTPIYLDDSQPIEARVQDALSRMTIEEKVRLSYAQGKFTSPGCSRLGIPELWYTDGPHGVRAEINWNDWGYSGWTNDSCTAFPALTCLAATWNPELSGKYGKAIGEEARYREKDVLLGPGVNIYRTPLNGRNFEYMGEDPYLASEMCVPYIQEVQKNGVAACVKHYALNNQELWRNHINVQVSDRALYEIYLPAFKAAVERGGTWTIMGAYNKVRGTHATHHKLLNNDILKGDWKFDGCVVTDWGAAHDTYEAAMYGLDLEMGSYTNGLTSESAFGYDDYYLGKNYLKMIKEGKIPMEVVNDKVARILRLIFRTAMNKNKPYGSMTTQEHYQTAYDIATEGTVLLKNGNRKEQAGLLPLQSDKYKRILVVGDNATRNLMTGGGSSELKPKNFISPLEGIREKFGNVIYAQGYMAGRDMFGRVDEIPQSVMDSLRNDAITKAADADLIIYVGGLNKNHQQDCEGGDRLSYNLPFGQDELIRSLAKVNKNIVVVLLSGNAVAMPWLDEVPSVIQGWYFGTVTGKALADVLSGEVNPSGKLPFSYPVKLEDCPAHAFDALCYPGDSINEIYREDILVGYRWYDTKKIRPMFPFGHGLSYTAFDYSKPMASAKKMKQDETIKFTVKVKNTGKVMGKEIIQLYIGDEKCSVLRPVKELKGFQKITLQPGEEKEVTFTIGSDALKFFDETQHKWIAEPGKFKAYIGSSSSDIRGTVSFELI

SEQ ID NO: 221 - protein, 789 aa, Bacteroides coprosuis
MKLKRLLGTLCIVGISSITMGQQKTVDQKVNDLLSRMTLKEKIGQMNQNSYFGLSDADIDKMPDLGLDENLRNIKVSEAQIAKMSRKDKIQYLKKQVLSGLDQSILQPIRKGEVGSLLNVVDPEMVNLIQKTAIKESRLGIPLLIARDVIHGYKTIFPIPLGQAASFNPEVVEVGAQVAAREARSVGIHWTFAPMMDISRDARWGRVAESLGEDPYLAAELGLAMVKGFQDGGNLKSNQSVAACVKHFVGYGAAEGGRDYNSTNIPPALMRNVYLAPFEKSIKGGAATLMTSFNDNDGIPASANKFLLKDVLRDEWGFKGVVVSDWASIAEMIPHGFAKDGEQAAELSANALLDIDMVSHTYHNHLEKLVDEGKVSMETIDAMVRNILRLKYDMGLFDNPYIDTKQKTPFYAPQHLEAAQKAAVESAILLKNEGVLPLNINTKIAVVGPLADAPHDQMGTWVFDGEKEHTVTPLKALQTTHKNIDYVYEAGLKYSRDTNTSQFDAVKQAVEKADVAVVFVGEEAILSGEAHSLSDINLIGKQSDLIREVKSVGKPVVVVIMAGRPLTIERDLAYSDAVLYNFHPGTMGGPAILDLLFGKENPSGKLPMTFVREVGQIPMYYNHNNTGRPAPEKVMTLADIELEAGQTSLGNTSFYLDSGRDPLFPFGFGLSYSTFEYSNLNLSAQTLTTNDILKVTVDLKNTSNYAGTEVAQLYVRDLFGSIVRPVRELKGFQRVTLQPGETKSVVFELPISELAFYGQDGTKKVESGEFKLWVGTNSNADLESSFQVK

SEQ ID NO: 222 - protein, 797 aa, Marinomonas posidonica
MTPKDILNALTVEEKARLCTGKDFWHLHGIERLELPSIMVTDGPHGLRKQSGEGDHVGLNASVKATCFPTASGLASSWNPALIEKMGVALGKECRAENVSVLLGPGINIKRNPLGGRNFEYFSEDPLIAGDMSTAWIKGVQSQDVGTSLKHYAVNNHEHCRMTVDAVVDQRTLREIYLPAFEKAIKQSQPWTVMCAYNKINGTYAAEHQQLLDDILVKEWGFEGIVVTDWGANNDRVEGIKHGQHLEMPSSGELNTQKILDAIDSGRLSIAALDKSVLRVLELIVKSQAALNNAPVNVDLERHHTLASKVAEESCVLLKNDQLLPAQKDQNVLVIGALANNTRYQGAGSSKINPFKLEQPLAQIEAVFGTNNVRYSQGYQLNDESDQTMIEDAVAQAEQADVIFLFAGLTPKYESEGFDRQHLNLPQVQLDLIDALGDQLGKTAVILQNGAPVTLPFVDKVPAILEAYLGGQAGASAIAKILAGDVNPSGKLAETFPLSLDDVPSQPYFPGTTKQTQYREAIWVGYRYFAHTAQPVLFPFGHGLTYSEFSFSELRIMDDKLDLKAVSFDEQTRIRLQVTVTNTGDRAGAEVVQCYLGQNKPSQPRPAKELRAYQKVFLEAGQSKCVELELNYRDFAFWCEADSQWRVESDDYHIQIGASVEDIRLTTLITLKTDTPLAPQNATLSAYFTPADRQFNDQSFSALLGKPIPDATPITPYTLNSTLGDIAQTEQGKPLFNAMLSVFSKMMEGDTNDSAAEADKLMAEAMVSDMPLRNLPVFNSQSYSEEALLALLADLNS

SEQ ID NO: 223 - protein, 574 aa, Chaetomium thermophilum
MLAPSITQSVANYYQHYIANEQETNRNPSGNVQSVSSNIDDRTMHEVYLCKILNGLLKTKLGFQGLVLSDWGAQHAGVATALAGLDMAMPNGDALWGSHLVEAITNGSVPESRLDDMVTRTIAAWYLMGQNRGFPEPGIGMPINLVQPHRVVDARNSSFRSTLFEGAVEGHVLVKNIRNALPLKQPKLLSIFGYSAKNPDHNHPTGGLSAWLWGSEPYSFSEFRDAFYWGKAIQTPIAFNGTLYSGGGSGATSQSLAVSPFDALIEQAYDDGTALFWDFYSGTPDVNPMSDACLVFGNAYSTEGADRPCARDDFTDNLIKHVADRCNNTVVIFHNAGIRLVDQFVDHPNVTALIFAHLPGQASGKALVSLLYGRSDFSGKLPYTIARNESDYSVLGPDLPQGIFTSFPQSNFTEGVFIDYRHFDAHNITPRYPFGFGLSYSSFNYSNLVIQKREEQDFGEYPTGLIVEGGQEDLWDVLILVSADVSNGGDVAGAEVAQLYLGIPAEGAPIRQLRGFEKPFLNVAETATVRFELTRRDLSVWDVITQKWRLVRGEFTVEVGSSSRDLPLKGKFVI

SEQ ID NO: 224 - protein, 739 aa, Tetragenococcus halophilus
MNQDPEKLLEQLSLEEKASLVSGTDFWYTTAIECLDIPSLNLTDGPAGLRKQAGDSDALGLNKSVEAINFPAANLIACSFDRKALQELGERLGNAAQSEDVSILLGPGINIKRSPLAGRNFEFFSEDPYLTGELGAAYVKGVQNKGVGVSLKHFVANNRENQRFTVSSNIEERPLREIYLHAFETIVKDAHPYTIMCSYNPLNGVLNAQNRTLLTDILRNEWGFDGIVLSDWGAVADSAASVQAGMDLEMPGKGKASQQAVVEAVQNNQLAVEDLDNSVLRILKLIQQLTDNAQTDPSYDKEKQHELARVLASNSMVLLKNDEQVLPIKEDDSLLVVGELADNPRSQGGGSSHVNAYKVSSPLENIQSGHSNVHFEQGYHLDQTADKNLSSKALEAAKKADKVVLFAGFPESLESEGFDKDSLLLPENQNRLIQEISQVNDNVVVVLQNGSVVAMPWIHQVKAILETYLAGETVGEATWDVLKGTVNPSGKLAETFPQRVEDNPTALTFNASTIDENYREGLFVGYRYYDKKKLAPLFPFGHGLSYTTFAYQDLTVEEKENNFILTVTLSNTGKVAGSEVVQVYISNQTSNIEKPEKELKQFEKVYLEPNETKKVKIVLDDSAFMWYNVDKKDWQIDDGSYLVQVGSSSADIRLTQEVTIQKGTKTHPEVTSDTYIADIMKRDDLKDLIATTEFGKTLNNLIGDDSNSKMLENIPLRAAEMMGFSPAQVKAFIDKANEK

SEQ ID NO: 225 - protein, 724 aa, Unknown
  Paenibacillus sp.
MEQQLNSYLQSMTLEEKVDQLLQLVGAFFEDAGTEGQITGPIASLGITEETVHNVGSVLGLAGAKEVIRVQQAHLSKNRLGIPLLIMADIVHGFKTIFPIPLAIGCSWDMRLAEESATIAAREAAVSGIHVTFAPMVDLVRDPRWGRVMESTGEDPYLNSEFARAFVRGFQGKDLTNDTDRVAACVKHFAAYGAGEGGRDYNTVDVSAWQLREYYLPSYKAALDEGCEMVMTSFNTVEGVAATGNKRLMRDLLRDEWGFDGVLISDWAAIKELIPHGIAEDEREAAQKALLAGVDIEMMTSCYNGHLPELVRSGQLDEALVDEAVMRVLKLKQKLGLFDNPLRGADPEREREIVFCDAHRAVAKELAIKSCVLLKNDSVLPLKRSQHIALIGPFAESGDILGSWSWSGSQDEAIRVVDGFQSKISSSLLTVATGCSIEDMTAEQYAEALQAASQAEIIVLALGERSDMSGEAGSRSDIRLPQAQLELIKRLKTLNKPMVAVLFNGRPLDLHGVIEEADAVLEAWFPGGEGGAAIADLLYGDAEPTGRLTMSFPQSVGQVPVYYNHFNTGRPQLDPNTKERYVSQYLDVPNEPLFPFGYGLSYTEVAYDSIQLSSETLVPGQALTVKVRVTNTGARPVEETVQCYVRDISGDTVRPMKELKDFHKVLLAPGESREVEFALSEPQLRYHHADLSFSSDSGEFAVFTGPNSRDTTEGRFQLVKETGK

SEQ ID NO: 226 - protein, 451 aa, Turneriella parva
MSTAELKRADFGDFVFGAATSAYQIEGAHDADGKTDSIWDTFTRRRRKIKNREHGRVACDHYHRVDGDVAIMQKLNLQAYRFSISWPRLQPTIGGAENIRGTDFYSRLVDKLLRANIRPFITLYHWDMPQYLEDKGGWINRDTIGRFADFASLVGRRLGDRVKDFIVFNEPMIFLSLGNLLGLHAPGRRSLRGFFAASHHVLLAQAEGARALRAVVGSAEIGTTISATAAYPASTSPRDVLAAQRFDTLFNTFYLEPVLGRGYPTAHFPALRRIEKHIRAGDMQKLQFDFDFWGLNTYTRKRVKYSRFIPFVHWRELKNDPNVPETAMRWEIYPQGIYDLLKKYGSYPEIKKLYVTENGAAFHDQVVQGRVADSYRIEYLREYLRAVQRAKSEGVKIAGYFAWSLLDNFEWAEGYHARFGLTHVDYGTQKRTIKDSGYWYSRLIAAGSEPT

SEQ ID NO: 227 - protein, 780 aa, Unknown
  Arthrobacter sp.
MTPDQILRKLTLDEKVAQLTGVMMTDLLAPPVEGSDAAFSFDVARLASLRPHGVGHLSMAWFAGSTRERLRNDVSAIQAQITESAPFGIGVLVHFEAISGVTHQAAPQFPTAWAQAAAWDPELIEAQAAVSSAYVHDVGGHLVFSPVMDIARDPRWGRVHETYGEDPELVARSAVSFVHGIHGRGAAPSVLATGKHFLGYAASEGGLNQAITTLGRRALVDEYAEPFRRAIDEAGLAVVMNSYNDIDGVPAVANRWLLTELLRDQLGFTGMVVSDYDSVKMLETIFHTARTPGEAAAQALAAGIDAELPSMDRFAGLADEVQSGRLDERIVDQAVERVLDLKNRLGLIPGSARHAGRPAPPAHETAALGKQIADQAVTLLTNDGVLPLKPGTRIVVVGPAADELRIHFGAYTSASDAEMLLGSRALAAGEIPGIDPETFVFTDIFQARMPGIEPRFEMNARAAHPDAPTLLASLRARSSSVACHPIGSFLGDASWGDESLAAVLAEADVVVAAVGERTGWVGNNTAGEGQTTAEPRLPGDQEKLIHSIAQLGVPVVTVVVTGRPLLLEEVSQQSNALVLAPLLGEHAGPAIADVLFGTVNPSGKLPSTFPRSVGQLPIYHGHHYGSGYDHPSGTRHGYNDLADSSPLFAFGHGLSYTTFDVTEAADTSAKADELALTVTVTNTGKCAGSTVIQLYGRVTAAPVVRPVRQLLDFRRVELDPGESTSLALSAPVTRLSYTGLDGSRYVPDGTVALSVGLASDDIRISSTIELPRYERLYGRV

SEQ ID NO: 228 - protein, 854 aa, Agaricus bisporus
MNRSFLDASIPDLVKKLKVDEKISLLGAPNWWNTTPIPRLGIPSIRMSDGPNGVRGSSHFVSTPAQCLPCATSLASTFDLDLIQKVGAFLGQEAKIKSSVLLLAPTCNIQRNPLGGRAFESFSEDPYLSGVMAAAYVRGLQSENVSAVIKHFVANDQESERLAADSVMSDRALREIYLYPFMLAQRDAQPSAFMTSYGRIKGIHCSENSELLQNILRRDWGFNGIVISDWFGTYSVSEAINAGLDLEMPGPPRWRQPLLVLQTLSTQKILLQKIDECVSNLLTFIQKQARCNPEVVYGDGVERTRDTPENRAFCRKLAAEGMVLLKNTNNVLPLSPNKVKRVAIIGPNAKERVISGGGSAALKPSYVVSPWDGITQNSPVGIEFMHHTGCYAHKYLPTLENNLVTPSGEPGWLCTFYAHDESEKPDTPIAEFKLHDTRIKLNDFLPPGLGSEWTIKLTGKLTFEKTAEFELGLTVAGRAKLWVDGKLTIDNWTNQTPGDFFYGQGTVEEKATVNFSAGKAVDVLVEYTNTVASDTDDDQHGGDRISQPALMRGVRLGGCEKFDAEEGIAEAAALAKESDVVIFVGGLTPEWESEGFDRPTLDMPGLQNQTISRLADANPNTIVVIQAGSAVSMPWIDSVSGILQAWYSGNELGNALSDVLFGKVNPSGRLPLTLPACIQDSPAYLNDKCENGKIHYREDLFVGYKHYQARGIKPLFPFGHGLSYTAFSLNDLQVSMPSEFDASSRVTVSALLKNEGQVVGSEVVQIYVSYPVDLGLTTPVNQLRGFRKAHDVVPGASHKLDIILDKYAFSLWDELRSAWRVSAGQYLIHAGFSSDALPLSVSVEIPQTFFWNGL

SEQ ID NO: 229 - protein, 834 aa, Nectria haematococca
MASVDIPAILATLSLEEKVSLLAGKNLWETVPVPSKGVPNVKVSDGPNGARGASFAGGTTAACFPAACLMASTFDVKLAKRIGSALAEETQSKGARCLLAPTMCLHRHPLGGRNFESFSEDPLLTGKMAARVVEGLQDKGVSATIKHFAVNEQETDRLTVDETVNERALRELYLRPFEIAVKEANPWAVMTAYNKINGHHADCHPFTLKKVLRGDWGWNGLVMSDWGGTNSTPDSLEAGLDLEMPGPTRWRKPEDVIAAIKEGKTSEKTIDERATNVLRFLERLGCFKDPTIPDEKAINKPEHQALIREAGSKGIVLLKNQDKILPLSKEKVKGKKIALLGHAKIGLAHGGGSASVSAHYKVTPWDALHEALGDSVEFSYAKGAHTFRTLPAIAENVVGLDGKPGFTFKVYEPGSSEPIETRHGHADSEVSALGSFGFLNKDVSLEGAFTPQETAQYYFTCSGLGPSKLIIDDKVVYEQTENCSDAMGFLFGGVAAPEFKVALEAGRQYKLVLRTSPPSANDREDLGILEGLCGLRVGSMSESEHDRDLVSEAVEVAKNADYAVIFTGHEPFWETEGQDQVSFNLPKDGSQDRLISAVAAANPNTVVVNSTGVAIAMPWLNEIQGFLQTWYPGQECGNSIADVLTGAQTPEGHLTCTFPKKIEDCPAYGNFPGEYDNGKLKVTYKEGVFIGYRHFDRLPADKVNFPFGFGLSYTTFDFSSLEVKESGEGYTASLKVSNTGDVVGAIAVQVYVGAAQTAEENPVKQLVAFEKVTVKPGETASVEVPVRTRDFGFFDESKQKWVVKGGDYKFLIGKSARDIVLESTVAVKEQSFDL

SEQ ID NO: 230 - protein, 861 aa, Bacteroides xylanisolvens
MKRGWIPIMGVCLVLSFSACKQLLPYQDTSLTAEQRAEDLLPRLTLEEKVSLMQNASPAIPRLGIKEYEWWNEALHGVGRAGLATVFPQSIGMGASFNDSLLYEVFNATSDEARVKSRIFGESGVLKRYQGLTFWTPNVNIFRDPRWGRGQETYGEDPYLTGQMGMAVVRGLQGPEDARYDKLHACAKHFAVHSGPEWNRHSFDAENIDPRDLWETYLPAFKDLVQKAHVKEVMCAYNRFEGEPCCGSNRLLMQILRDEWGYKGIVVSDCGAISDFYRPGTHGTHPDKEHASAGAVRAGTDLECGSEYASLADAVKAGLIDEKEIDISLKRLLTARFELGEMDEQSAWSEIPTSVLNSKEHQALALRMARESLVLLQNKNNILPLNTHLKVAVMGPNANDSVMQWGNYNGIPAHTVTLLEAVRAKLPEGQIIYEPGCDRVDGKTLQSLFDECSINGKPGFLAEYWNNRDREGEVVATDQISTPFHFATTGATTFAPGVEITNFSARYESVFRPSQSGDVAFRFQLDGEVTLIIDSEQVARKIYVKNPTNLYTLQAKAGKEYHIEILFKQRNERATLDFDLGKEVGIDLNLAVKKVMDADVILFAGGISPSLEGEEMPVEVPGFKGGDRTDIELPDVQRDLLKALKKAGKKVVFINYSGSAIGLVPETTTCEAILQAWYPGQAGGTAIVDALWGEYNPGGRLPVTFYKDVNQLPDFEDYSMKGRTYRYMQQQPLFPFGHGLSYTTFTYGEAKLSKNTIAKGENVVLTIPVSNVGQRDGEEVVQVYLRRPGDKEGPRYTLRAFKRVHIPAGKTESVAISLTHESFEWFDEATNTMHPVADTYELLYGGTSEQNQLKSVTVHVQ

SEQ ID NO: 231 - protein, 760 aa, Sediminispirochaeta smaragdinae
MKNQEKLKKLTVEQKARLCIGMNFWMSQDYPEAEVESLFFSDGPHGLRQQDVQHADHLGLNESISSICFPTGSALACSWNRDTFAKVGDALGRMAKRAGIHMVLGPAINIKRSPLCGRNFEYLSEDPYLTGELATAFVKAMQENHVSACPKHFLANNQETRRKSINTIVDERTLREIYLPGFEKSVTEGKTMGLMTSYNKVNAVYPAESLEITRKILREEWAFTGTLVSDWGAIDQIVPSIKAGLTIQMPGNDGSTATKIIQAVSNGELSENELDSAVMTLLDTLEFTHGKARDTITEDECHAIALEAACDSIVLLKNEGNALPLSGCRIAVIGEMAKKPRYQGGGSSHVNPYKLTNSYDEMLKYSSAISYADGYHGDTSSEEVLKEAIGAASQADAAVVFVGLPASYETEALDRTSIEIPEDYNRLVEEVLAVANKTIVVLCNGSSIAFPWADRVDAILEVYLCGECSGEAIAKTLFGYNNPSGKLAESFVNRLEDTPAFLDFPGDGREVRYTEGVFVGYRYYDVKKIEMLYPFGHGLSYTDFTYSGLRLSSAKMSSNDTLSLSVMIKNTGNKAGAEVIQIYVQSPLGMVKRPIKELKGFEKVYLEIGEEKELEFLLPPRAFSYYERDLHDWYTPSGEYTIHVGSSSRDLRLSGTVFMHNEYSFIPRITRNSLLMDILPHPDLFEIFKTTYAKIKPYLPFGLHKAALDDKVSQALLKNMTFNSLAGYVGNHLSDEDIEILVKKMNQKLGATLSVTKERN

SEQ ID NO: 232 - protein, 864 aa, Deinococcus proteolyticus
MPLCTPYRSPVLTADSTSGPALTDVVRGPPVHCWDMVQTPPAASPPTPDFQSCLRRAEALPLPEVLALLSGRDYWHTQAAGGARALRMTDGPHGIRRQLGDQSRSDLNNSAPATCYPTASALAASWNPALVGAVGEMLGREARAEGVDVLLGPGLNLKRSPLCGRNFEYFSEDPLLSGDLAAAWVSSIQSQGVGASLKHFVANNQEYRRMSIDAVVDERALRELYLAGFEKAVRGARPWTVMAAYNGVNGRYCCESPRLLQGILRREWGYDGLVVSDWGAVSDRAAAFHSGLDLEMPGVPALTAPALEVALREGRVQEAELRRAAARVLQLAARADTAQAAEQPFDPEAAHALAREAAVQGSVLLKNDRLDGTPLLPLRPDTGRLAVVGAFAAQPRYQGAGSSQLVPRRLDIPLDALREAFGAAQVTYSAGYPRAGDQSDPQLLAEAAQAAAQADVVVAFVGLPEAFEVEGIDRQHLGLPASHNALIEELLVSNPRLVVVVQGGAPVELPWAERVPAILNAYLGGQAGGSAVAALLSGAANPSGRLAESWAAQLEHWPSSDQYPGGPRTVEYRESLLLGYRYFDRPEVQAPVPFPFGHGLSYTQFRYSDARPAADGRSVTLTVTNVGSRAGAEVVQLYLHRPQETSAVLRPGQALAAYARAELAPGESQDVTLTLPARAFAHYDPFWGRWRTEAGEWQVRIGASSRDIRVQYRVQVAGETLRYEQEPGGGTLPASYRRLSFPLRVSRSDFQALYGRPLPDNRDYRTGSYTANTPLDAMQEHPLASGLFRVLVWHQRDLVGDTGASMNSAHNLRQLPLRAMNMNPGLTANPPLARFLAEVINRHYGPALRELRLALRRSWHKRRH

SEQ ID NO: 233 - protein, 795 aa, Unknown
  Sphingobacterium sp.
MIKRQINLVLILIIICPLLSFKYVKPQPIYKDPRKPISERIKDLLSKMTVEEKVGQLATLLGWEMYTKSDKGVTVSTKFKEAVQREHIGMLWATLRADPWTKKTLETGLSPQEAAMATNALQKYMVDSTRLGIPLLLSEECPHGHMAIGTTVFPTAIGQASTWNPTLIQEMAQAIAAETRAVGGHVGYGPILDLAREPRWSRLEETYGEDPVLNAKMGRAMVTGFQGTDLSSGKNIISTLKHFTAYGVPEGGHNGGSVTVGQRELYQSYLPPFREAVKAGALSVMTAYNSIDGIPCSANPWLLKDLLRNQWNFKGFVVSDLGSISGLVGSHHVAANAAEAASQAINAGLDADLSGYGYGRALLAAIKEGKVTEATLDTAVSRVLYQKFALGLFENPYVDIKQVSRTVRIPNHIELARKVAQQSIILLKNNGNLLPLSKSIKKLALIGPNADNIYNQLGDYTAPQAEENIVTVLEGLQAKLGAGTRIDYVKGCDIRDTSEIAISTAVQAAEAAEVVVIVLGGSSARDFKTSYQETGAAQVTATQGKISDMESGEGFDRATLDLLGKQLELLKAVKATGKPVVLVTIKGRPLNLNWPQEHVDAIIDAWYPGQEGGNAIADVLFGDYNPAGRLSVSVPKSVGQLPVYYNYKNPTKHDYVEVDAKPLYSFGYGLSYTTFAYTDIRHQLTETPDDFNLSISFKVKNTGKYAGDEVVQLYVRDEISSVVTPILQLKNFQRIHLKAGEEKKMEFVLHAEDLKLLNAQMKWVTEKGRFKIMIGSSSDNILLTTDVELNKDYNL

SEQ ID NO: 234 - protein, 734 aa, Sphingobium chlorophenolicum
MTFPRSLFLASTILAFHCNPSFARNESPAKAIERADKTLKAMTPEEKTILTHGIMPLKILPNSPEPPAEAIPGAGYIKGIPRLGVPALYETDASLGVSYVFGLRKDGATALPSGLAQASTWNPALIEKAGRMIGAETRAKGFNVLLAGGVNLMRDPRNGRNFEYLGEDPLLAGTLVGHAIRGIQSNHIISTIKHFAFNGQETARKLVDSKISAANAHESDLLAFKIGIEIGDPGSVMCAYNKVNGHSACDNNWLLNTVLKHDWGYKGFVMSDWGAVPSLGAALNGLDQQSGEQLDTAVFFGDTLAAAAKSNPVYAKRLDDMNRRILWAIYNNGLDANPAKPGGVIDFKAHGDIAEQVARQGIVLLRNERGVLPLAASTKRIAVIGGYANSGVLSGAGSSQVQAEGGPAVYIPAGNGDENSSFIAESYHNSVPLKALRAAAPNAEITYRNGRYIAEAVAQAKKSDVAIVFATQWTSEGFDVPDMSLPNGQDALLAAVAAANPNTVVVLETGGPVMMPWLDSTAAVIEAWYPGARGAEAIAAVLTGKVNPSGKLPVTFPAHKDQLPRAEVDGMDSTEPSFLGMPDLKGQALVADYDIEGSNIGYRWNALKGNKALFPFGHGLSYTSFAASGLKTDGARASARITNTGKADGATIAQLYLVSRTGKPARRLVSFQRVELVAGQSKPLAMTIDPRLLGDWRDGNWTIVAGDYGFALGEDAEHLGPVTTVRLKGRTWRD

SEQ ID NO: 235 - protein, 441 aa, Caloramator australicus
MAFSKDFLFGVATSSYQIEGAFNEDGRTSSIWDTFSKTKGKVLNMDNGDVACDHYHRYKEDVELIKELGVDAYRFSIAWPRIFPKEGEYNQKGMEFYKTLLKELKGKGIKAVATLYHWDLPQWIQDKGGWEKRENIEYFVEYAKKCFEELDEYIYMWITHNEPWCASFLSNALGEHAPGKRDLQAALKVAHHILLSHGMVVNLYRKLGLKKPIGITLNLSPSYPASREFKDKIAANNCDGFFNRWFLEPLFKGSYPKDMVNLYSNRVSDFSFIKEEDFNIIGARCDFLGINYYNRSLVEFDPMSILLFRGAYSEYKKTSMGWDVSPDEFIDLIQMVREKYTDLPIYITENGSAWDDNLVDGQINDTDRIEYLIEHLKAVEKMNEMGLNIKGYFYWSLLDNFEWGYGYSKRFGLVYVDFKNQMRIKKVSFYKYKEIINRRTI

SEQ ID NO: 236 - protein, 739 aa, Commensalibacter intestini
MLVSLPSPAFSAEPVWKDTSRPAAERAKALVQAMTPAEKLQLVVSHYAVDNGPGKSSVPKGAVGGAGYVPGIDRLGIPAQQITDAGLGITNPNNVRPGDGATALPSGQILSGTFEPDLAYQAGQVLGREAFHRGFNVLLGGGGAVLVRDPRNGRNFEYLGEDSLLAGNIAAAQIQGVQSQHVIATAKQFAFGAIETNRMKVDMRIGEKEGRESDLLAFEIAVKQGNPGAIMCAYNKVNGDYSCENSYLLQLPKRNWGYRGYVLTDWGATHSTVKSANAGLDQESGASFDQKIYFGKDLKEAIAKGEVSKGRLDNMVYRIVYSLIDVGAYDHPAYKSDQAENVAADEAISQKIAENGIVLLKNHHNILPLSSQIKSIAIIGGKADQGVLSGGGSSQVTARGGNIVDHTRMQQWPGPVSYFPSSPMKAIQALVPNAKVNFAAGNDIQQAVDLAKHSDVAIVFATKWSAEGFDSANLQLSAEQNQLIEAVAKTGKPVVVVLETGNPVEMPWLHDVDGVLAAWYPGTSGGPAIANILFGQVNPSGRLTTTWPKALSQVPYPYIEGAGKIVNADVLAVKQYSSDNQAVSSVNLNEDGANVGYRWYEQKRLTPLYPFGYGLSYTTFKYKKLILEKDFDKDRHTMIANVTVENTGNRDGADVIQIYGKIPGETTSRLLGFRKVYLKAGETQTVPVTLFSVSLAHYVPVKHSWEIISGNYEISARSDSLSHDALKTNIHLDQIDVQD

SEQ ID NO: 237 - protein, 707 aa, Unknown
  Paenibacillus sp.
MDNKKIIELLQKMTLAEKIGQLSQTTGEHYVGKIDIEMVETGPDFPDHMLEGDTLYTMGSIIGVSSARITNLIQSKYLQKSRLKIPLLFMHDAIHGYRTIFPIPLGLSCTWDEGIVQQAAADTASELRAAGIHVNFSPMVDLVRDSRWGRVMESFGEDHLLSGNLGRSMIRGYQKDEDGEFAESGVAACLKHFAAYGAGIGGKDYNAVDMSWREFYAYYGKPYEIALQEKPKFVMSSFNTFNGVPVSASEQMMKEILRGTYQFDNIVISDWGAVAELQNHRVAGNDKEAAEMALKAGIDIEMVSTLYLEHYEQILEENPALIQDIDAAVLKILQLKNEMGLFENPFVNEARENEVLMNPRFLEHAKDIAKRTCVLLKNEQMLPISKEYKKIIIVGPFAGSNQLLGNWRCKGSFDDVVTLAEGMKRVDDSFDLQVYESLKDCPQAELEQSDYIVVAVGEHWELSGEGHSSVNIDLEASQQQLIREVKQTNKPYACICFSGRPLALQNIIDDIPALLWCWYPGTQAGSAIAELITGQDTPSGKLTMSFPRHSAQAPIYYNEYSTGRPANESSYSSRYQDCEIGPLFPFGHGLTYTGAQYSDFKISRHHLTAGEELTISFQVSNPSGYDYSEITILYIEDLVSKAVRPVREMKKYQVVGVPAHQTVNVQMTLALDDLQYLDTSLQQTVETGKFNIYINDLDHPVFTIEYR

SEQ ID NO: 238 - protein, 357 aa, Nitrolancea hollandica
MPDPALPWWEREPIMRGVNLGGWLLLERWMQPSLFAGTAARDEFELCHAWGREAERRLREHRESYIGRDDLVWLKRVGINTVRIPFGYWLLTGDPPFVAGIDVLDQALRWCQDLGLMVILDFHGLPGAQSREHHTGRANHFQWHRDPDHQRRSLEILESIAARYTDVSSLIGIEVVNEPAESIPATLLDRYYRAAYERIRRHLPPERAAIIFPAFTERRLRHFHGRYRPPAFENIITDLHYYQCFGGWPSAMTWDEQITYPLTHRLPEIKRANERGWLMIGEWSLRLPWKPRDWTRELPPAGYDTVMRGYAAAQLWAYEQTRGWCFWTYKAEGEPEWSFRDCIERGWLPTPVDAGMG

SEQ ID NO: 239 - protein, 849 aa, Cryptococcus neoformans
MTKVTIINPEAVLKELSSEEKIALLSGDDMWHTVAVPRLGVPRVRCSDGPNGVRGTAWTNGAPASCFPSSTGLGASMDVDLVRRIGEALGEECRARGVHCLLGPTTNCQRHPCGGRGFESFSEDPHLCGHIALAWIEGVQSKKVMITPKHFLANEQEYLRRSNNSVIDERTMHEIYLEPFRIQCKARPAVFMTSYNRVNGLHAAEHPFLLRKILRGDFEFQGMIMSDWSGTYSSSEAVKASLDLEMPGPALMRGSSLERDIIGGKLVPADIDECALRVLRYVQEAQQSGIDFEKDEETIDTPYIRALLREAADSAVVLLKNDKGILPISFPNGKKIAVIGPSAKTASYAGGGSANLAPTYLVTPLEAITTLASRVGARVEYTVGSDSSRWTPLLTPFIHHPTMGKDAGPGVQCDFYVQNPWENKVKPIFSKYNNSAFSYFIDGIPKEVPIRGYVSLKAIFTPDESGIWELGLGVAGQADLFIDGKKIVDNSTDQKEGLLFFNTGAEERTGELNVEAGKSYDLEVRFSNFKQLNAMSPYTGRRGGIRIGGRKKRDAHAEIEKAVKLATESDIVILCIGTNSEWESEAYDRDDMKLPPGTDELARAILSSKPETIVVNQSGMPVEFPWLDDASAIVQAFFGGNECGTAVADAVFGIVNPSGKLPITWPRVLEDYSSHEGFGHPINTVYSEGLGVGYRYFDRGNHPKSAFPFGHGLSYTSFTLSELAVNPEAFGAKATFTITNTGEIDGAEVAQVYIHDLAPIVERPEHELAGFVKVHLRPGESKVVSVKLDHKAFSFYSVQEKCWVGRMGDYEIRIGTSSTLIHLSKPVHLARSFKWIGLQEPQVYEPAWI

SEQ ID NO: 240 - protein, 804 aa, Acidipropionibacterium acidipropionici
MTELTDLPQYLLIRLLSGADDWRTVAAGEVGVRSLHLSDGPHGLRVPDVKGGSLPATCFPTAVTLGASWDRDLAEEVGGALAVEAGALGVDVVLGPGMNIKRHPLGGRNFEYLSEDPVVSGELAAAMVRGIQGRGVAACVKHFAVNNQETMRLCVDAVVDERTLHEIYLAAFETVVRTARPAAVMASYNEINGTAATTNRSLITEVLRGRWGFDGLVMSDWGAVWDRVAALEAGLDLEMPSSAGAFDRSVAAALDSGRLGLDAVLTSVSRLVGLQNRISPPRIDRIPADEHDALARRAATAGTVLAANDGILPLAAGSKVAVIGAFAARPRYQGSGSSQVNPTRVTGLLEALGAKDVEVGYARGYDPEEQRTDAVLVAEAAELAAASDVAVVVTGPPEELESEGYDRTGMDLPAQHDALVRAVLAANPRTVIVVCSGSPVALPWADRAAAVVLAGLGGQAGGGALADVLVGDAEPGGRLAETWPHDLSEVASDPWFPGTGAMVQYREGSAIGYRHTATNGVEPAFCFGHGLSYTRFDWRDAVLTEPWIVAGDGLSVDVEVANVGDRAGSDVVQVYLSDRTGVVSRPRRWLAGFAKVRLEAGQSRRVQVAVGARELGFWDVEKHDWVVPSGHFDVELGRSAHDIVATLDLVVSEGADHAPERAWTPLIAEDDEAFAARLGHEIPRPAATTPFTARSTLGQVRHTPLGGLLHAAAMRRLAAGVRDPRFRRMMEHTVDELPLRNLPSMTKGLVPLESVSLIVDVLNGAPDEILRRSFGGALGLGRGVVDAGRGLWGELSSRIGRLGR

SEQ ID NO: 241 - protein, 761 aa, Unknown
  Prevotella sp.
MMNLQLQIRRATMLGMLLLGIAITTNAQRQRSKAVKKQVPILGRHVMTTAEDLFVADLLRKMTLEEKVGQLSQYVGGSLLTGPKSGALSDSLMARGMVGSILNVGGVDNLRKLQEKNMRLSRLKIPLIFGFDVVHGYKTIFPTPLAESCSWDLDLMYRTAKAAAIEASASGIHWTFAPMVDLARDPRWGRIVEGAGEDPFFGCKVAEARVKGFQWNLGKPNSVLACAKHFAAYGAPQAGRDYAPVDISPATLAEMYLPPFKACIDAGVQTFMSAFNDLNGEPATGSHWLLTDLLRNQWAFKGFVVSDWNAVVQLKAQGVVENDRDAAIMALKAGVDMDMVDGLYNAHIADAVRKGLISEFTVNTAVERILRQKYRLGLFDNPYAFLDNAREQQTVRSAELMALAREAATKSMVLLKNEGGVLPLSKQVRRIAVIGPLADNQAEVLGSWKARGEDADVVTVVKGLRNKLGTNANVVYVRGCDFLDTKNNEFAKARQAAANADVVIAVVGEKALMSGESRSRAFLSLPGLQQQLIDTLKSTGKPLVTVLMNGRPLTLARVAEQSDALLEAWFPGTQCGNAVADVLFGDVNPSGKLTVSFPYAEGQIPNYYNYRRSGRPGDMEQTSTVRHIDLKNRNLYPFGFGLSYTTFEYGAIECASHFDANGRLKVSVEVKNTGDRDGEEIVQLYVADKVASMVRPVKELKGFKKVMIRRGETQRVDFELRVHDLGFYTNTMKYVVEPGEFDIMVGPNSEQLNGKTVVWNK

SEQ ID NO: 242 - protein, 781 aa, Rhodobacter capsulatus
MRKSSEDKGFLDDLLSRMSLADKIGQLNFPHAAGLPTTGAAEGADTETLIRRGHLCGTSAGANIAERRVLQRMALEESPHGIPLFFARDCLQRYITCGPIPLALSCSWDLDLISRIAQMTAREARADGVSLTWAPMLDISYDARWGRIAEGHGELPHLCAAIAQAIVTGYQGADGDMARPDRMMATLKHFAGYGLSIAGRDYAAVEASPATLMRIMEPFKSGVAAGAGAVMVAFSAINDIPATAHRVLLQDILRDRFGFEGMIVTDFTAIDPELIHHGIAADARAAAYLAFKAGVAVDLVSGAFLHHLAALVEEGRSAPDARPWGPVTEAEITARCRQVLRAKERLGLFADPFMGLDEDLRAKVVRCPDHIALVREAAAKSLVLLKNTGVLPLARGKKLALIGPLAEDRIDMQGSWAIDVNPMDSVTIAEGLTAVAGPDTRVLIAKGCSIVEDPALAARLNVHNRAMPSVPPESRSLEAMLAEAHTLAATADAIILALGEAKEHSGESSTRVDITLPGAQPRLVREMAQVAKDRGIPLILLVISGRPLALTEEAALSDALIWTGHPGAEGGPAIAEILFGDRAPEGRLSISLPRHVGQLPLRIEDLPSGRPQDGIGVDVYGDSEIDATGRHVFRKFTTACILESPHTPLYPAGFGLGYTSFAHGQPQLSATELQGAAAVLDVTLDITNTGTRAGTETVQLYLRDPVAEISRPLRELKGFARLTLAPGETGTARFQITAADLEYDRGPDLAQMRRDWEGGAFRLNIGPHALDTQEISIRWTK

SEQ ID NO: 243 - protein, 763 aa, Stigmatella aurantiaca
MELRNGNQGQGGIHLTSGGNGTIRPAPSNPQLAGTTLHRRVETLLAQMTLEEKAGQLAQYSVGTPTGPGTGRNDYETLVRTGAAGSLLNVVGAQETNRYQRIAVEQSRLKVPLLFGFDVIHGYRTTFPIPLGMAASFDTALVEQSMRLAASEAAAEGIRWAFSPMVDIARDARWGRVAESSGEDPHLGSAMARAYVRGYQGPSLSEPTSVAASVKHFAGYGAAEGGRDYNTVDMSDVSLRQIYLPPFQAAVEEGAATLMSAFHSHNGVPATANGYLMTRILREEWGFNGFVVSDWTAVAELVNHGIALDGPAAALKALTAGVEMDMESHLYGPEVPRMVREGRLSQAVVDEAVRRVLRVKFALGLFEHPFVDEKAAAYVATPQKRELARRMAEASFVLLKNEGGVLPLPPSGRKMALVGPLADAAAGMLGIWSAKGAPQDVVTLRAALERRLKDTGTLRCAQGTGVLSEETSGFQDAVAAATAADVVIAAMGEDETLSGEAGSRTSIELPGNQRQLLEALAATGKPLILIVFSGRPLALTDVQAHASAIVQAWQPGIEAGPALVNLLWGEVNFSGRLPVTFPRSTGQVPLYYNHLNTGRPAGKTDLTRPPSCPAEKYVSRYLDERNTPLYPFGHGLSYTTFDFAPPTLSASALTAREVQKQAKDVLRVKTRVRNTGKVHGTVVAQLYLRILGASTAQPVRQLAGFQRIALAPGESRELEFTLGFQELSFFDTRSVRGVESHTRYDVWVGDSSEATQHTSFMME

SEQ ID NO: 244 - protein, 442 aa, Sphaerochaeta globosa
MQNIVFDKDFLWGCATASYQVEGAIEEDGRKPSIWDTFCSQDGTIMNGDDGSIAADQYHRYKEDVQLMSDLNFQAYRFSIAWPRILPEGRGTVNQKGLEYYINLSQELHSKGIKVVATLYHWDLPQVLQDEGGWAVRSTAYAFAEYAKVCFEALGPYVDQWITLNEPFCTAYLGYLQGIHAPGIKNPQQAYNAVHYLNLAHGLAILEYRKSGLKAQIGTTLNPSLPRPASRKAEDVRAARYARAIFTDVFLLPLVGKGYPVEVTQDMHISFPIQSGDMQIIAQPIDFIGINYYMERAVVLDESDLFLHREVPSWQRTTNQDWPIVPYGLLRILKYFDTVTNGLALYITENGCASDDELVEGRVHDHFRCDYINEHLAACKQAIDEGVNLKGYFVWSFMDNFEWAWGYSRRFGIIYVDYESQERFPKDSAYMMRDIISGYCEY

SEQ ID NO: 245 - protein, 449 aa, Sphaerochaeta coccoides
MAFTFPDDFELGVASAATQIEGGDTANSWYDWYATGHIPDGSDPSVATRHYELYEEDARLMESMGIRHYRMGLEWARLEPEEGVFNEEVFTHYRDEIQLLQSMGIEILLTLHHFTTPLWFEKLGSFENPKSVEIFLSFVKKVIEELGDLVSQYITINEPNVYVSHGWFLGAWPPGKKSMKAAFRVMTTLCVCHIRAYTLIHDMRRCNGYDDTMVSYAHHMRSFVPLKRYNPIHLIMTPLFHRIFQSSISRSFLTGASSWPIGRMKGIRKGLYCDFHAVNYYSRTAVSGLSDGTLPHVPVNDLGWEIYPEGIVKNTQELFRLANLPIYITENGTCDNEDSFRNRYISEHLKMLCESGLPVKRYYHWCFTDNFEWLEGVSARFGLVAVDYATQKRIIKKSGEFYIRMIAEKGISENLEKEYCKQAYRLDTAHVTAAPDATEKQKKQEKKHE

SEQ ID NO: 246 - protein, 889 aa, Unknown
  Novosphingobium sp.
MVFPVAISPVSVAAQEAGSMTGISPVRAKARAMAADLVAKMTLDEKLGQLLNTAPAIPRLDIPAYNWWTESLHGALGSLPTTNFPEPIGLAATFDASLVKDVAGAISTEVRGLHALARKTGRMGRIGTGLDTWSPNINIFRDPRWGRGQETYGEDPYLTARMGVSFVEGMQGPDPDLPDVIATPKHFAVHNGPESTRHHANVFVSRHDLEDTYLPAFRAAIVEGRAGSVMCAYNRVDGQPACASQELLQEHLVDAWGFQGYVVSDCDAVKDISDNHKYAPDGAAAVAAAMRMGVDSECHTWTLSDTDGLTDRYREALERGLITVSDVDRTLIRLFSARLRNGDLPGVRKLSTFTSSAADVGTPAHGALALKAAEESLVLLKNDGILPFQTAGMKVAVIGPFGDATRVLRGNYSSTISAPPISVVDGLRQAMPKATVSYVPFGETVTDGDPVPESALVSDDGKPGLTARYYNVQGTPPKLFDPGKRDEYLKTVKFSEKPVVTRRERSVDGRSLDLAQVSDHHRVVWTGYLVPPESGTYRLGLSGFQSGRMDFDGKPFVDLKDAQWGSLPTMKTLTLEKGHRYPVRIIGEAHTGTAGIGFAWKRISTDPAGDMRRAAQAADVLVAVVGLTSDLEAEESPIEIPGFKGGDKTTLDIPADQQELLEQAKATGKPLIVVAMNGSPINLHWAKENADAILEAWYPGQSGGLAIANVLTGKANPTGKLPLTFYRSVEDLPPFDDYDMKGRTYRYFTGKAVYPFGYGLSYTTFGYGPVAVEPASGGAQDGIRVTTQVSNTGQRAGGDAVQLYLDFPDAPGTPNIALRGFQKVSLQPGETRQVTFTLSPRDLSSVTPDGVRKVLKGHYRVTVGSGQPGFSAATRSADFSVEKAVTLPK

SEQ ID NO: 247 - protein, 855 aa, Arthrobotrys oligospora
MDATTLKEIEETLAQLTLEEKISLLAGKDFWRTVPLPEKQIPSIKVSDGPSGARGDTFSGGQKAAFFPSGILMGATFNPELAYETGELLSEEVRAKSASVLLAPTACCHRSPLGGRNFESYSEDPLLSGKMASGYIRGVQSRGIAATMKHFVANEQETWRLYVDETIDETTLREIYLKPFEIAMREGQPWAIMTAYNIINGVHCDSHPLTLKQVLRGEWNYEGLVMSDWFGCNSMVESLLAGLDLEMPGPARKRPIKEFVEAAEKDESVRKAIDDSARRILTLIAKVGKWKDMTPEAPEYSRNDPETGKLIRRAGGEGTVLLKNEGKTLPLQPGSLKKVAFIGPNAKATVAGGGGSANLEPNYLTQPYETFVTAIKEINGDIEVPWVQGCIIDRWVPNIDVEGGFCRVGGPDSEAGLFLEWFRGYEATGEPVATTVFKTSNAFLWDSRPTSISPSEEFSVRFSGQISVPEDGKYNISLSTITASKLYLNGELLIDNWDFKERGNLMMNVGSEEVVKTIELKKGEWYPILVHNSSIWPKDSPRDPPMEEIGALGIRLGVAPVYDNAVLIAEAADAVKDADAVVIVVGLNNEWESESYDRSDTKLPNNQDDLIEEIAKVNQNVIVVNQSGAPVDMPWAENSNVKAIVQAWYAGQEAGHVIADVLLGKQNPSGKLPLTFPIKVQDNPSYLYFPGRDQKVEYTEKLMVGYRYYDTENVQTRFPFGYGLSYSTFSIGEPSLSTAELTEGQTFTANVDVSNTSNVAGAEVVQLYVKRPASTSSIKRPVKELKGFKKVHLGTGETATANITVDDKSLGIWSTEAGKWVVEAGDYEVLIGTSSVQDELKPAGKITVKAAWSWI

SEQ ID NO: 248 - protein, 453 aa, Lactococcus lactis
MENKMPKDFFWGNSTSSMQTEGGWNEGGKGPSVYDVNTVGRSAKDWQVTNDNYHHYSQDLDLMKEMNMNMYRFQISWSRIVPDGDGEFNEEGIAFYNRLIDDLLARGIEPMICLYHFDMPLNLAEKYNGFLSRKVKEAFVRFGQEMMKRFADKVKYWIVFNEHNLYFADGFEHYSGVLKKELTLSDMYTVFHHTMLAHCELTQFLHENFEAKIGGMLATTEIYPATFSPKDNLYLRKFDEFYNRNLCDVYAFGHYSHEVMTYVKNQNIQMDFQKGDEEILKNGISDFISFSYYRSILLDASQLTENDAPNSYLTKGMKLNPLLEHNQWDWSIDPEGFRRILSRLYNEFGLPVFPIENGIGQSEIWDGKTKIADDLRISYHQKHLEAMKKAIFTDGVEVMGYLGWGLIDIPASSGAIDKRYGAVYVDSKSHKRIPKKSFHWFKNVFASNGDHLD

SEQ ID NO: 249 - protein, 743 aa, Phaeospirillum molischianum
MTNFIDELMSKMSLKEKLGQLNLLTSNVPIDQNRADEIRKGNVGGLLGGLIDCSFGINGPAQLRTIQEIAVHESRLGIPLLLAYDVIHGHQTVFPIPLGLSCSWDMDHIETAARIAAREASASGINWVFSPMVDIGRDPRWGRIAEGSGEDPHLGSQIARAMIRGLQGKDLSSPDSVMACVKHFAGYGAAEGGRDYNNADMSSSRFQDIYLPPFLAAIDAGTGSAMMSFSALNGVPSHADRERLEQVLSGVLKVSDFNGIPEMIAHGIGDEEGQIDEADPLQTMSERALRAGVQMDMMGYGFVTRLEKALAAGRISQQQIDSACRAVLKAKYKLGLFAAPFARFDEKKAVHSILAPDYRHTAREIAGDSCVLLKNENALLPLPKSGITVAVVGPLADDKKNVLGPWSFQGDSRTAVSVLEGIRNVAEVKMIYAKGSNIVEDRRMVELLNFAGPKVDIDPREPDEMIAEAIRAANASDVVIAVLGEAAEMSGESASRLDIGIPDNQRTLLKALGKTGKPIVLVTMNGRPLTLPWEKDHIPAILVSWFGGMEAGNAIADILFGERNPSGKLSATWPSHVGQVPLSYYHANTGRPGNPKEDPGKYTTRCYLDGSSDPLFPFGFGLSYTSFAYGPVEADKTVLTGDDDVLTVSITVTNTGGRDGTEVVQMYVTDPVASVVRPVRMLKGFQKIRLRAGEKKTVSFSITTRDIEFCDSRLLPVWEAGKFVIGIGTNSNELNTAEVVWNK

SEQ ID NO: 250 - protein, 742 aa, Modestobacter marinus
MTATTPSDPTALPLEQKVRLLSGQDFWSTPAVAEAGLSSVVLTDGPHGVRRQQGEFDQIGLLESVPATCFPPAVAVGSSWDPEVAERIGAAVGVEARAIGVPVVLGPGVNIKRSPLCGRNFEYYSEDPLLAGVLGAAHVRGQQGEGVGASVKHFAANNQETQRMQVSADVDERTLREVYLPAFERVVTESRPATVMCAYNKVNGVYASQHRWLLTEVLREEWGFRGAVVSDWGAVDDRVAALEAGLDLQMPGDSGAGNALVVEAVRAGVLDEAVVDRSVRRVAALAGLVAEPTAGFDVEAHHALARELAAGCAVLLKNDGGTLPLTAGTRITVVGEFARTPRFQGGGSSHVNATRVDDALTALQGAVEVTFAPGFTLDGSGDAAALREEAVAAARGAEVTVVFAGLAEADESEGFDRTTLDLPAGQVDLIRAVAAVSLRTVVVLSSGSVVSLEGWHDDVDAVLAGFLLGQAGGGALADLLTGAVDPSGRLAETIPLRLQDTPSYLTFPGEQGHARYGEGVMVGYRHYETAEQPVRYPFGHGLSYTSFATTDLQVRTRGADGATATVTVTNTGERAGRHVVQVYVATAAGPVRRPARELRAFTKVSLAAGESATVAFELDRRAFAYWDVREHDWVVAPGEYSVQIGASAADVLDQRTVTLAGDDLVPELTLQSSVAEWFAHPVAGPQLLAGFVAAMPDGAAEMHEGMLQMIGSMPMRRFAADFGSAVPAAELDRLMAAARAAR

SEQ ID NO: 251 - protein, 724 aa, Saccharothrix espanaensis
MTSEQAALTSGADFWHTASTPPITLTDGPHGVRLAGTPGDPLTGRPATCFPPAVTTGSTWDPDLLRRLGEALGDEARSMGVAVLLGPGVNLKRSPLCGRNFEYFSEDPLLTGVLATAWVRGLQSRGVGASVKHFAVNSQETDRMTVSADVDERTLRELYLTAFQRVVREARPWTVMCSYNQVNGVYASQNHFLLTDVLRGEWGFDGVVVSDWGAVVDRVAAVAAGLDLAMPGPDDTGDRALVEAVAGGRLAPEALATAADRVLTLVRRAAARQAGEYDRDAHHALAREIAARGTVLLKNERAVLPLPADTSVAVLGEYARTPRYQGGGSSAITPTRLDVPLTRIATATSAPVRFAPGYGPPGPDGTPAEPDPALIVEAVAAARESDVALVFVGTPEETEGRDRTCLDLPAAHVDLIRQVAAANPRTVVVMCNGGVVRTTPWDAEPAAVLECWLPGQAAGSALADVLFGQVDPSGRLAETIPLRLADHPSYLDLPGTDGHLRYGEGIHVGYRGFDAREQEVAYPFGFGLSYTTFEYGTATATADDTGIRVRVEVTNTGDRDGREVVQAYVSRPGSRVRRAPRELKAFANVPIAAGATAEVVLDVARDDLGHWDVALGRWLVEGGPWHVSIGASSRDLRTTVVVDVPGDEVHVPLTAGSSLADWFADPRGARLLGAALAGPPGSPAVDPALLAIAAAMPLDRLARLLPGGPLDPAAVAALVAAANS

SEQ ID NO: 252 - protein, 562 aa, Cronobacter sakazakii
MTSVKHFAAYGAVEGGKEYNTVDMSSQRLFNDYMPPYKEALDAGSGGVMIALNSLNGTPAASDGWLLKDLLRGDWGFKGITISDHGAIKELIKHGTASDPEDAVRVAIKSGVDMSMADEYYSKYLPNLIKSGKVTMAELDDATRHVLNVKYDMGLFNDPYSHLGPKDADPKDTNAESRLHRDDARKVARESLVLLKNRLETLPLKKSGTIAVVGPLADSKRDMMGSWSAAGVADQSVTLLQGMKNVAGDKAKILYAKGANVTDDKGIVDFLNLYEPAVVVDKRTPKAMIDEAVNVAKQSDVVVAVVGEAQGMAHEASSRTDLTIPQSQRDLISALKATGKPLVLVLMNGRPLALVKEDQQADAILETWFAGTEGGNAIADVLFGDYNPSGKLPISFPRSVGQIPVYYSHLNTGRPYNPEKPNKYTSRYFDEANGPLYPFGYGLSYTTFSVSDVKLSAPTMKPDGKVTASVTVTNTGKREGATAVQMYLQDVTASMSRPVKQLRGFEKITLKPGESQTVSFPIDIDALKFWNQRMKYDAEPGKFNVFIGLDSVRVKQGEFELL

SEQ ID NO: 253 - protein, 852 aa, Verticillium alfalfae
MNGNRGVVDSFLEELTLPEKIDLLAGKNMWETASIDRLGIPSLKTTDGPAGVRGKIWSGGSRTTFIPCGVSLAATFNLSLIEEVGEVLAPTMNINRSPLGGRNFESFGEDPMLTGRMASAIISGIQSQGVGACMKHFVANDTETNRYNVDEKIDDRTLREVYLRPFKLALEAHPWTVMTSYQKILGEHVDASSRLVKDLLRGEWGFDGLVMSDWGGLNDTIKSLAATTDLEMPGPAVRRGKKLLEAVKKGDVDEGTQIDQSVRRVLTTIERAGVLPSSPTSSSRVEVNGPEDYDSVAGEHEDDSDPSFRRIARQAAREGLVLLKNKTILPIKPKNLKRIAILGPQAKKPTAGGTGSAAVNPYYVSSPYESLSEALLSENSNIHIQYEKGIRTSDVPPLLGDRLQNAAGQGLRADFYAGHNFKGNIIETTYWKDSIVYLMSDGDVPAELADRDYCFRVSGALVPDVSGMHTFSLANIGQARLYLDDEVVIDNTSWIETSGLFMGCASREKTAQVSLENGRVYRLRVDYVATPPPVEAYDNTLFHKVSGARIGLLAPEDEDEMLSRACDAAEKADLSLVVVGLDPDEEKEGGDRSSLEMPERVNKLIKAVASRGEHVAVIVQSACSVGMPWVHEVDSIVQAWYQGQENGNALADVLLGKHNFSGKLPVTFPVRIEDHGSSPYFPGDAKNNRTEYGEGVLVGYRHFDKHQITPLWPFGFGMSYTQFRLFGARVSGFVSASQNSEATATVSVQNIGPCDGQEVVQVYVSPSSEISVRGLQSYNKALGGFNKVSVAAGQTRQVNIKISSEVFQWFDVGDGMEDIKEGSWRVDPGTYRCYIGNSSAADFDEVDIEVRE

SEQ ID NO: 254 - protein, 723 aa, Bacteroides xylanisolvens
MAIFAMGSMAQNQKDEAQMNRFISGLMKKMTLEEKVGQLSQCSGGFATGPDNTRISRTEDISKGLIGSLLNVSGAANTRKYQEAAMKSRLQIPLLFGLDVIHGYRTGFPLPLAEAASFDLDAIERGSRCAAKEAAAAGLHWTFAPMVDISWDARWGRVMEGAGEDPYYGSLVAKARVHGLQGDDLSKENTILSCIKHFAGYGAAIAGKDYNSVDMSMGQFVNFYMPPYKAGAEAGAATFMSAFNDFNNEPSTGSTFLLRELLKNQWGFKGFVVSDWGSVGEMMNHRYAKDEKEAAYKGIKAGLDMEMVSECYSKNLVSLVKEGKVSIKLVDDAVRRILEQKYKLGLFDDPFRYCDEERERTVIGSQESRKEACYVSERSIVLLKNENSVLPLSSSIKKVALIGALSKSQKDMCGAWSCAEVGKVVTLYEAMEKRGVDINYNDGYDLKTNKIVNLDQTLAAARQSDVVIVAMGEQAWESGEMRSKGDISIAAEQQRLVSELVKTGKPVVVLMMCGRPVIFNEVRREAPAILCTWWLGSEAGNAICNVLWGDYNPSGKLPMTFPQHNGQIPLYYQYKSTGRPTALGGWCAKYIDIPTEPAYPFGYGLSYTTFNYSDVKLLPGDGKGTYTRVAVTVTNTGKCEGEEVVQLYVRDEVASITRPIKELKGFEKIKLSPGESKTVTFDVKDEQLGFYNNQMKFIVEKGDFTLMVGGNSRDLQEIKYILN

SEQ ID NO: 255 - protein, 785 aa, Leadbetterella byssophila
MFCSGMCLNFQNSTKIILNTHEKTIYISRHIFLLISALRPASPQLGKNSVQEVLNAMTLEEKVDLLVGAGMPGFGGPTVGQTENLVPGAAGTTKAIPRLGIPAIVLADGPAGIRISPTRQNDTQTFYATAFPIATLIASSWNLELAENIGKAMGKEALEYGADVLLAPALNLHRHPLNGRNFEYYSEDPIISGKMTAAAVNGIQSNGVGTSIKHFAANNQESLRSKNDVRIKNRTLRELYLKGFEIAVKESSPWTVMSSYNKINGTYTSESRELLTTVLRDEWKFDGIVMTDWFGGTNIVKQVHAGNDLLMPGIKPQKDAILQNVKDGKLDVKDVDVNVRRILDLILKTPRFKKYPYSNKPDLKAHALIAREAAAEGMILLKNEKLTLPISSETKIAAFGVTSYDFISGGTGSGDVNEAYIISLMDGLSAFSVERKLAEKYSVYVGDYKEKNKPDPNNPMAAFLNKPRMPELELSESEIGEYAKSTDMAIITIGRNSGEFEDRKTTNDFYLSDEEQNLISKVAKAYHSKGKKVVVILNVGGVIETASWKEKPDAILLAWQAGQEGGNSVADILSGKVGPSGKLTMSFPNDLKDVASNNNFPIDIELNFQEMMGGGPPNSAQEPRKNLEFTTYEEDLHVGYRDYITNKKQVSFPFGFGLSYTSFDFRNSKISGDSKVGFTLKVTVKNTGKAKGKEIVQIYRSNLNKDPDRELISFGKTKELAPGEVQILTFKINSEDFSIFDESINAWVTKAGNYHLLIGKSVSDIILTENVEIKEKFERRVIARF

SEQ ID NO: 256 - protein, 711 aa, Sphaerochaeta globosa
MAVRWFQRAFKRIIQKRMVEMLASRSYTLNHEPMHLLLSESDERSVAKRLVAEMTLEEKISLLSGFEEFCIPGVERLGLKPVWTSDATLGLRGWKATVTDFPASVALAATFDNELLKQVGSVMGYECRALGVGVLLGPGVNIARVPVNGRNFEYFGEDPYLASEMAVHYIAGVKQYPVITTVKHFACNNSEYDRHKSNSEVDERSLRELYLPAFKRAIEAGSLGIMTSYNQVNGSYTSEHPYLIEGILRGEWGFDGLVVSDWNSLYSTDGALKHGVDLEMPQAKYFTKERVLDALRRNVVVEEDLDAKVLHLLTSYEKAGLFTAPMADPCCKVGSPESRTIALKAALAAPVLLKNERQALPLSASMKLCIGGSNAFRVAQGGGSSMIQHESEPETFAYRMQGSGATLLPARWYAHAKEKQRVRACDAVVLVVGFDHIEESEAYDRPWTLGESDRKAIDMAVKLNKRTIVVVQSGCALEMESWQDGVAAMLATSFLGSCTAQALQSLLLGEVSPSGKLPYTQARHVHDYRSMRAYPKDFEAVTVARLKKGQGDPAVRAVEKLCYTEALMVGYRQFDTEVTEPLYCFGHGLSYSTFCYGHLMVDELSPGKWQLSLTVTNTGSFPASEVVQLYVHALEPVIFRPFQELKGYQKVFLEPNAEKEVQFMVDAKAFERWDLNAWKFVSDEGQYELRLGSSSRDIRLTAVVEYKNRKP

SEQ ID NO: 257 - protein, 709 aa, Sphaerochaeta coccoides
MEKRMFRVDAWKIARRIVSRMTLDEKISQIDYRASAIPRLDIPEYNWWNEALHGVARAGIATVFPQAIGLAAMFDSDMMERIGAVISTEGRAKYNEAVRHGDRDIYKGLTFWSPNVNIFRDPRWGRGQETYGEDPYLTARLAVAFIRGIQGDGKYLKAAACAKHFAVHSGPEALRHEFDARVSQKDLHETYLSAFKAAVKEAQVEIVMGAYNRVNGVPACASHELLSDILRSEWGFEGHVVSDYEALEDIFKHHHYVADEAHTMAVALKAGCNLCAGKIARHLRSSVDEGLISEDEITEAVERLFTTRIMMGMMADDCPYDSIGYEENDTPEHHQLAVEAASRSFVLLKNDGLLPLEMEKISSIAVIGPNANSRKMLEGNYNGTASRYVTVLEGIQDLVGDSVRVWYSEGCHLYKNFHSSLSGRNDRLAEAVSAAQHADVVVLCLGLDATLEGEEGDVEVGFGSGDKPNLSLPGRQQLLLDTMLTVGKPVILLLASGSALTLGGRENDENLKAILQIWYPGAMGGKAVADVLFGRRAPAGKLPVTFYASADELPAFEDYSMAGRTYRYMKGNALYPFGYGLTYSPCSIVSAGISGKTADGGVEITVDIRNDGGRTTEEVVQVYVKDMDSPLAVINHALAGFRRITLAPGEKTSRTIVIEPEAFTVVDEGGRRIPGGRRFLFHVGFSQPDSRSIALCGIKPVELEYLRTD

SEQ ID NO: 258 - protein, 538 aa, Haloplasma contractile
MNEKINRNRVKGFLKAKGRTIVNGDGEEIILTGWGLGNWLLPEGYMWMSHTGAFDRPRRIEAVIRELTGSEYSKQFWKRFRDNYITKEDIQAMADQGYNSVRIPFNWRNLMENEPGLIWKEEGFKLLDQCIDWCEQFGIYAFLDMHGAPGGQTGANIDDSIDDRPRLFLDEDSWSKGLAIWRKLAERYKDRWIVGGYDLLNEPIRPKNEVGDYDYLVPKLSQFYEEAIATIREVDPKHLFSIEGHHWSTRTDVFHKKYDDNMVIHFHRYACLPDKSAFTEWLELSQKLDAPLWLGETGENLVEWYTAIYPLSVSLGIGYNLWPWKKMNCTNSPYSIKTPEGWSKLLAYTKGGPRPSYDEATKILDEYLENMKVKNCNYNKEVTNSVFRIPGCSVRATDFDELPGKSNSFSGIRLGNNDTKYRSGTGMCIKEDDTYKKEQRFYFDCMWDRFLLNLEAGEFATYSINHVTYENSVVFEYTCDKHASISIYQDDCELGTVTLGKTTTKTTTKQVSLLSANEATIKVSVNEGGVDLARIYFK

SEQ ID NO: 259 - protein, 456 aa, Nitrospirillum amazonense
MAATKAGQVVFPKDFLWGAATAAYQVEGGWNADGKGPSIWDTFTHQKGQGRIKNDDTGDVACDSYHKYREDAALIRQMNLKSYRYSIAWSRVQPLGKGAVNQAGLDYYKRLTDAVLEAGARPLVTLYHWDLPQALDDAGGWTNRDTSDRLAEYADIVGRALGDRINHWAILNEPKTFTHLGYWEGIFAPGHKDPLQMLKATHVVNLSQGKAFRAMKAINPKFQVGSVCDVANMMPRTDSEADKAAAERYHRFLNLWFLQPVLDGTYPDVLPADQRDALLGFQPGDEKIMRADYDMVGLNYYTRWVVADKPEGNGVPGLNTSHEWGEGPHAKTDIGWDIDPDGFHDTLVRMAKAIGNRPIEITESGAAYNTPLVDGHVKDEKRIEYMKAYFAALSRAIQDGAPVRAYHAWSLMDNFEWAQGYTQRFGLTYVDYRNDQKRTIKDSGLWYAKVAKNNGF

SEQ ID NO: 260 - protein, 457 aa, Azospirillum brasilense
MAVLPKDFVWGVSTSAYQIEGAAAEDGRGPSIWDTRCRTAGGVVNGDTGDVACDHYHRYAEDVALLRDIGVGAYRFSISWPRVLPRGRGAVNEAGLDFYDRLIDRLLEAGIEPWACLYHWDLPQALQDLGGWANRDSAGWYADYAVLCARRFGDRVTRWATFNEFSVFTLFGYALGWGAPSVSDRGEHLKVIHHTNLAHGAGVDVLRALVPGASIGAVHSFQPCRPADPAPENVEAAALFDELWNLCFPDAQILGRYPPRIARAIEPYVQAGDMARICRPVDWFGMNHYAPLFAQAEPGAVWGCGFGAPPKGMPRTDIGWPLQPSAFHEALMHAAARYRLPIYVTENGYGTKAPESPDAQGIVMDRERLDYLQACIGEMARAVRDGADVRGYFVWSLLDNFEWGGGYGTRFGIVHVDFETQARTPKESAKWYSALIGGALGGQTAATPGTGRFAGRS

SEQ ID NO: 261 - protein, 451 aa, Phaeospirillum molischianum
MTVVRPTEAAPSRQFPKDFFWGASSAAYQIEGATETDGRGPSIWDTFTANGHIMDGSSARIACDHYHRYAEDVALMKQAGFSAYRFSLGWPRIVPAGTGAVNPKGLEFYDRLVDKILKAGIRPMACLYHWDLPQPLEDMGGWQSREIVGPFADYARIAVARLGDRVKDWYPLNEPNVVAVSGYGTADHAPGLRAGDLGILKVLHHQNLAQGAAFRAIRAERPNVRVGTICNLQPSRPENDEPLNRAAAIRWDAVWNRVALDGVLRGAIPDVLAEKMAPIVKPGDLETIRFPIDSLGINYYSRMTMRHEPGRPFDVGWGDAHCNRWTGMALPVQPDGLYDLLLELKTLYGNPEVFVAENGAAYDDVVSPDGQVHDPERVAFLKDHVAEVARALKDGCNVKGYLVWSLLDNFEWAFGLSKRFGIVRVDFDTLKRTPKDSYRWFAEVIRTGRVG

SEQ ID NO: 262 - protein, 828 aa, Modestobacter marinus
MNPASSTRTDTMTDTTARTDSRLTDALAALSLEQKVQLLTGRDFWNTWPIEEIGLRRILVSDGPSGVRGEVWDERDPSLNLPSATALASAWDPDIARRYGAAAAVEARRKGVDVVLGPTINLHRSPLGGRHFEAFSEDPVLTAELAAAYVTGVQDNGVGATPKHYVANDFETDRFTVDVRADERTLRELYLLAFEKAVTEARAWLVMSAYNGINGATATENDLLETPLNSEWGFDGVVVSDWTAVRSLESARSSQDLVMPGPVGPWGDALVEAVRTGAIDESVVDRKVLRILTLAQRVGALEGSPAIDPVWVEDGVALAREAAVEGTVLLENRDELPWDATSLRKVAVIGNNAAAARTQGGGSATVLPEYTVSPLDGVRAALPDAEVSYSLGAVVQDGLVELPLAELTNPVTGGPGLRARFLTADGAELFGEDRRKSVLVYFGGDAPIAAAATYELTARWTPTESQTVRLGFALIGAAQLYVDGELLVESDLQPSGTDLGAAFMNPLTASAEVELVAGKPVDVRLVHDLSAKEGFAAHALFLQLGTEPAEVDEDALIAEAAEAAEAADVVLVVVGTNSIVESEGYDRESLSLPGRQDDLVRAVVAANPRTVVLVNAGAPVLLPWRDDVAALLLGWFGGQEFGNAVADVLLGVAEPGGRLPTTWPAAEADVPVLSCTPVDGVVEYTEGIHIGYRAWLRSGATPAYWFGSGQGYTCVELTGVEAPSRARPGEIVTVSVEVANRGERDGKQVVQVYAEKPDSTVDRPVRWLVGSAPVRVPAGQTAQVEVAVPTRYLAHWAGGWQYEPGVYRLRVGTTAVELPLETTLEVSA

SEQ ID NO: 263 - protein, 499 aa, Wickerhamomyces ciferrii
MVFDKLKKLTGDKPLVPAAPAAPAGQAPDKKTIYRNRYNFGVNFGSQFVLEKFIFDKFFVDNTGTELEAITAYIKQNGADNTQKDLEAHWSGFATDDDWNWLKSKGVKAVRLPIGYWHVNGGSFASGTPFASIAGVYKNAWNHIKDVVNKAKDNEIGVLVDLHAVPGGANTGDHSGQKLDKPEFWSNKNYQQIAIQALEFIANEFKDQENVVGLQIVNEIDFDNNPSNQQEYYRKATKHIRQIDGNIPIIISDGWWPDQYVKWINENEQNLNNQSVGLVIDDHVYRCFSDADKAKSPEQIIKDLDGDVLTNLSGPADIIVGEYSLVLDGESWNKTSGDRAQLVHQYGNELSRIFAERASTGTYFWTLKFEHGDGGEWGFYPSVNSGAIPAHPTGLSKVPTEDEFNSILNNELNQHSSYWDGQNPNEKYEHWRYQEGFTSAWVDSQSFGQFNGSKIGRLSAWKSARRAEHIQNRGNSNFIWEWEQGFDKAISIFSQVAFQ

SEQ ID NO: 264 - protein, 463 aa, Unknown
  Gloeocapsa sp.
MFVQDKFLWGVASAAYQVEGGYQADGKGRSNWDVYTNDYQVTKAFIDKQHTGNVAINFYERSQYLQDIALMKQLGVNAYRFSIAWSRILPNGTGEVNSQGIAYYNQLIDDLLANDIEPVITNFHWDLPYKLQQRGGWSHSDSVQWYVEYTNVLFTNYGDRVKKFITFNEPFIYLFFIEPLAHNAIAKKANPYAISNETYGKQAEAVHHLLLASAIATQNYHQLNLGGVIGITLSFTPTIPLDANNIEDVQAATVFDGLHNRWFLDAIYKGKYPDDIVKLHQKYNPALQVSAADMQLIAAHKPDFIGVNFYAPAYIKADASAPYGAEWFSTNPDEVKMFNGPVRPEYLYQLLVWIKNEYGNPTIYITENGAGFGAADEQLNGNIVKDRLRTDYIKRHIDSALQAKRDGVDLRGYFLWSFCDNFEWLFGYDKRFGIVYVDFDSQQRTPKQSFYAYQQIINERKCE

SEQ ID NO: 265 - protein, 464 aa, Sphaerobacter thermophilus
MADQIHRREFPEGFKWGVATSAYQIEGAWDEDGKGQSIWDTYAHTPGKIRDGSTGDIANDHYHRYKEDVALMKEMGANAYRFSICWPRIFPEGTGTPNPKGLDFYNRLVGELLAAGIEPFPTLYHWDLPQALQDKGGWQNRDTPVAFAHYAGYVAEQLSDQVRHFFTTNEIQSFADGGHRGVDTHVAGGELHLEAAPGLRLPPGELNQVRHHAVLGHGLAVHAIHAMGKPGTQCGPAEVISIAVPLIESDEHIKAAEVATRELNAPFLTVILEGRYTDAYLEKAGKDAPRFTPEDLATISEPVDFVGINVYKPNIYVLASDTTPGYRAIPYSASHPKMFSDWHMLGPEALYWGPKMVQSLWGAPAIYITENGCAAADELAADGNVYDTDRIMFLRNSLTQLQRATAEGVPVKGYFLWSMMDNFEWMNGYGDRFGIVYVDFDTQQRIPKMSASFFREVSMHNAVA

SEQ ID NO: 266 - protein, 648 aa, Bacteroides xylanisolvens
MVRGYNKFFIKGFEEKGILPVYLSDATQGVNIRNNLPDPNVVKQLERSTAFPSPILLASTFSPELSYQYAKAIGEECRAGGIEVLLGPGLNIYRQSQCARNFEYFGEDPYLVSQMVSQYVTGLQSTGTAACLKHFYGNNTEFYRKRSNSIIGERAMNEIYLPGFKAGIDAGAMSVITSYNQIDGEWAGQSSYVIKKILREKLGFKWLVMSDWNSVWDLEKVIKSGQNLEMPGSYNFGVSVLDLYHEKKITEKDLDDMIRPTLATCVAMGFYSRPKYDTTLLSKYPEHEQTARRVAEEGVVLLKNRNEILPLDPTKNRKILLTGKFVYEIPRGYGAAEVIGYNNVSLIDALQKVFGRTVYYIEKPTVAEIKEADVVLLSMGTRDKEAVERPFALPREDESFMRYITKNNPNTIAIINTGSAIDMSAWNEQLAALIYGWYGGQSGFEALTDIIIGKVNPSGKLPMTIERSFKDSPAWGYLPQGASLYNELKNEHLINVYDVNYKEDVLVGYRWYDTKKIEPLYPFGYGLSYTTFALTKPRLSSNKMNDKQTIKCSVTLTNTGKCEGAEVVQLYIKENQPSVLRPEKELKRFEKVSLKPGENRILEFIITSKDLAFWDDQTHSWKTNTGQYTIFLGTSSRHINQTLSFIKE

SEQ ID NO: 267 - protein, 767 aa, Prevotella buccae
MFRLFLTGLLLGLVSGASPKKVMDYTNSNLSVEQRVADLMGRMTLEEKVGQMCQYVGIAHMLNAQKTLTEEELKNSHAEGYYPGYTLEDIREMTRKGLIGSFLHVVTTEEANYLQKLARQSRLKIPLLIGVDALHGNGLYHGATVYPTPIGQASTFAPELIERMSRETALEMRACGMQWAYAPNVEVARDTRWGRIGETFGEDPYLVGQMGIATVKGLQTDRLSGQDKVMACVKHLVGGSLTSNGINGSPADMSERMLREVFLPPFKKCVDAGVFSLMPSHNDLSGIPCHGNRWLLTDLLKKEWGFKGIVVSDWMDIERMNDFHGTAPTVKEACLTGVNAGIGMHMHGPGFAEYVLEGIRENRIDPALINAAVGRILEAKFRLGLFENPFVAPGKVGEVVFTGTHQQTALEIARRSVVLLKNEKGLLPLQKGRYKRIFVTGHNADNQSILGDWSFEQPDNRVTTVLEGIRQQDSDAEIDYQDIGRNVQGLTPQQVDEATLRARKADLAILVVGENSMRYFWKEKTCGENSDRYELSLPGLQEQLVEAVVATGVPTVVVLVNGRPLTTEWIAENVPAILEAWEPGSLGGQAVAEILYGAICPSAKLPITIPRSTGQIGCYYNHKFWANRFPYATGKSDPLYPFGYGLSYTTFSYSPVRLSAARMPPDGAANATVDVTNTGDREAEEVVQLYIRDDYSSATRPVKELKGFRRISLKPGETRSISFDILPETLAFYDADMKYGVEKGTFTIMIGSSSRTDDLQSVSLSVE

SEQ ID NO: 268 - protein, 799 aa, Grosmannia clavigera
MSTPSTTYVDHQALADKALAARELVGTMTAEEKTALLTGNGMWKTARLARLGVEPAVMTDGTYGVRYSVPQIDGDEQAGTDLDAFLSVVQQRASEIDKAWGQLRPATCFPNGSAMGCSWDIDLMAHLGVLLGRECRTMGIHTLLGPGINIRRTPLAGRSYEYYSEDPLLTGKLAAAVITGIQDQGVGTSLKHFAGNNSEMQRTSMDSVVDARALREIYLRGFQMAIRDSDPWTVMSSYNRLNGVQAAEDPWLLTQVLRRDWAYDGLVMSDWNGIKDRAASLTAGNELDMPESPRRKADLLAAIRSGELSADVVDAACVRVLDFIARCHAGCTVPVAPTDLAAHHVEARRMAAASMVLLKNDGAVLPVAPTVRRVLVVGRDAETPVIQGSGCATTMPTQVDEPLAELRALLGPDVAIELDSRNTADDSLFARAAAAHLVVVFASTEGAYDGEGSDRSTLALGPGQDALITALADHCTTPMAVVVACPDAVAMPWADRVGAVLVTFYSGQAMGGAVADVLTGRVNPSGKLSVTFPHRLGDVPGFLSYPGEQGRHLYSEGIHVGYRGYDFRHCTPLFPFGHGRSYTTFRYADLQLSASSIGRSGHVTASFSLHNTGTVAGAEVAQVYLRAKGHLLRRSPLELKGFAKVVLAPGETRRVDVAIDGRDLTVWDPVRNDWVLEAEDAELVVAASSRDLRLAAPLTLRPSVLSWARVSFDSQPAYVIGNPVARPILRRELAREANISPHDADVVLDHCANSFIGIFPTLERRLRITVPNTRALEILTMINTAMDEAELKLQEGASE

SEQ ID NO: 269 - protein, 816 aa, Melampsora larici-populina
MLTQSYITFLSVLARISYPSFINQAIATRQSIDLSDKSTSNVDSSNYHFEVIQAPPGYEEWVSPTVLPSPSQDGSQGWEDSLKRAKKLVSQMTLEEKINITTGAGIEKRCVGETGTIPRLGFNEPICLQDAPVGVRLVDLVSYFPAEINVASTFDRSLIRRRAIALGAEFAGKGIHVALGPMTNLMRSPLAGRNWEGFGADPFLSGVGSVETILGIQSKHVSACVKHFVGNEQEHYRGGSDSIPSSSNIDDRTLRELYAWPFEESVRAGVDYLMCSYNAVNQTQTCENSQLLNGLVKGELNFQGVLLSDWTAVLTTERTALAGLDMNMPGWELYNAGLPSEPDPSKATSSYWGVRLIDAVRNGSVPMSRIDDMVQRVISTYYKRGQDKESFPKLNFQSVGQGTEAEQAANNQHVNVQADHHKLIREIGSASTILLKNLNQTLPLKAPKSLQSILILGSDAGDNPNGANSCEDRNCNEGTLAGGWGSGSAIYPYLISPASAIRSYLHADHPNINLDIVLNDTNYERIEASASIAELTIVHVSADSGEGKVETEGNAGDRNDLYLWHEGDKLILSAAKMCANTVVVIHSVGPVLMEAWIDHPNVTAVVYAGLPGQESGNAEVDVLWGKVNPSARLPFTIAKRREDYPADIIYESNQTVVQIDYKEKLEIDYRHFDAHSIKASATFFHLDKQFLIFSFVNLQLERLIKDFTSNELSGSRKDAIEINFKVSNIGKWDGHEVSQLYVGFPDHAEEPPKLLKGFDRVMIKSGESVTVSIKLRVIDLSIWSVKKQAWVVPQGEMKIWVGSSSRDIRLNTTFAV

SEQ ID NO: 270 - protein, 856 aa, Prevotella multisaccharivorax
MHSKNMGISGRAFLLFLMIHPSITMIEISSHPVQADILSHEDRVYDLVGQMTLEEKIYVLESDFFYRGCERLGIPRIETADGPSGVASWGLKGRATAFPCQLALAASWNRSLARHIGSLYAKEWRARGINVFYGPGVNIYRSSKDSRNFEYMGEDPYLASEMAVSLIKGIQQGGVIATVKHFVANDQEFDRYKVSSEVDERTLHEIYFPPFKAAVQRADVKAVMMGYNLVNGIYCAQNRYLMKDILRDSWGFKGTIMSDWGATHAAYESVEAGLDMELGTFDYLNKEKLLPLIKSGKIRESQIDSMVTHIFLPCFELGIFDRKTVKDTSIPTFNEEANKAAYQEACEGIILLKNEKNILPLASPKTIAVIGPNANPNIVDDNVYDVKGASYGGGGSSKVSPWYVVNDMEGIRRAFPNARILYHEGVSNAYKRNLFKHSSFQTQEGRRGLTGSYYMLDEQNPEKVLKPSIQRVDATINFNWAEGSSDVKALGKNYRIQWDGYIASEKDDSVVFLVDAQGGYRLTVDGRIVIDERNSQSFANRYVRVASKRNERISVRLEYWNQNSNPAEIRLAWDYASSVDTSEAIRIASKADYVIFCGGLDASLEFEGTDRQFELPYGQDELINSLTKVNPNIIVALHGGGSLRMTPWIDHVAAVIHLLYPGQEGGTAFGDILSGKVNPSAKLSFTIEKEWKDSPAYGNYDETRKERKVYYREGIFVGYRGYEHQGIKPLFPFGHGLSYTNFDYSNLKVQVIDRKNGCVKVTMDITNTGQRDGAEVVELYVHDAKSKLKRPYKELKDFEKVFLKPGETKSIEMNLCKEAFEYYDPDLHKWVLEPGVFDILVGSSSENIRLKGNIRL

SEQ ID NO: 271 - protein, 472 aa, Streptomyces zinciresistens
MSSPSFPSSFLWGAATSAYQIEGAVREGGRTPSIWDTFSHTPGRTAGGEHGDIAVDHYHRFRDDVAMMADLGLDAYRFSVSWSRVQPTGRGPAVQVGLDFYRRLVDELLARGIKPALTLYHWDLPQELEDAGGWPERETAYRFAEYAQIVGEALGDRVENWITLNEPWCSAFLGYASGVHAPGRTEPEASLRAAHHLNLAHGLGTTALRSVMPARNTVALSLNSSVVRPLSQDPADLVAVRTIDDLANGIFHGPILHGAYPRTLFDATARLTDWSFVQDGDLAAIHQPLDALGLNYYTPALVSAAAERPSGPRADGHGASEHSPWPGADDVLFHQSPGERTEMGWSVDPTGLHELLMRYTREAPGLALYITENGAAYDDKPDAEGRVHDPERVAYLHGHLSAVRRAIADGADVRGYYLWSLMDNFEWAYGYEKRFGAVYVDYGTLARTPKSSAHWYARAARTGTLPAVDEVF

SEQ ID NO: 272 - protein, 773 aa, Granulicella mallensis
MNWKGIIGYSSLKKRFLVLTGVCLSSVTLFPAYSQSIASSGKTKTVLIYEQSNLPLETRLADLLGRMTLEEKVRQLDFYSGTDSLLDRGSKNSLPSKQSPFSTAKADALFGSLGAGAIHDLDPTPEQYNTIQRWVIEHNRLHIPALFIEEGLHGFDTGTVFPAPLNLASTWDPSVAEKTGSAIAAEARATGVGMILAPVLDLARDPRWGRIEEDFGEDPYLTGQMGLAYVRGAQGESLNTDHNVVAEPKHFAAHGSPEGGTNTSPVHIGERELRSVMLKSFEPAFRQGHAMATMAAYHEIDGIPVTADPYLLKTILRQEWGFQGMVLSDLGAIRRLYQLHQVASSPKAASCLAIKSGVDMQFYDFDHDVFQKALIDCVHEGSLPQADVDRAASAVLRLKFTLGLFDRPYVDPTLNAKAYRSKPHLDVSLQSARESLVLLKNENGLLPFSKSIQRIAVIGPNADVARYGDYEEEANGLHISILQGVKAEAPHAQVEFDSGKDIAAAVAKAKSADVVILGLGEWRGISGEAFDRTSLDLPGEQEKLLEAITATNKPVVLVLENGRPLTIGWAKAHVGAIVEAWYPGEFGGQAIAETLFGDNNPAGRLTITFPKTVGQIPDYYNTDPSRAYDSDLTRRKVYVDNDSQPLFPFGYGLSYTTFHYCDLQVTPPAAKSNEDVSVTFTVTNTGTKAGDEVSQVYLREQFSSVETPVRSLKAFTRMPLQPQESRTVTLKIPRSELAVWNADEKWAVEGGKYTVWVGGSSEADLAKEFDLQP

SEQ ID NO: 273 - protein, 834 aa, Gibberella zeae
MTPSQATTDLVSKLTVEEKVSLLAAVDWWRTPTIKRDDVFIPHIKTSDGPNGARGESYVSGITAACFPCSTALGASFDQEQAYRMGEEIAKETITKSANVLLAPTMNIIRSPLGGRNYETYSEDPYLIGTLASAFVRGCQSQGIAATPKHFVANDSEKSRTKMTSNIDMQTLREIYLLPFQLVLRDSDPWCFMTSYNRLNEEYCADSHWLLEEILRKEWGFSGLVISDWMGTYSTAKSLNAGMDLEMPGPTRWRGKKLIAEIEAGNVSMEVLDKSVGRVIDLAKKTGRFDDPVEKPERSVEDPARIEYITAVAADGMVLLKNDNNVLPLSEHDSVAVIGHFALQPSIGGGGSAKVLAQHIVSPLQGLKSRGVTCRFAPGVPVFGALPHAVPDSISEVQLRWFNGSVVGENLAHEQTVALPEYMIKEAWPDYLRKDYCSSMSFNLIPKTSGDHIFSVITTGKADVIVNGENVFHRPQEPVLLPESFYFYKAKIERRFAFNMTAGQEYNVELRSWATDEDVLSRIGGTMFQGASLRFMEHIDIPRAISDAADAAGSSDTAVVFVGTTNEMESEGYDRDTMDLTSDQYDLIAAVVARNPQTVVVNLSGSPVTVSPFIDQVPTFLQAWFAGQECGHAIVRVLLGDVNPSGRLPMSWPRRNEDNPAYPNFPCNDDLVLNYEERLKIGYRFYDDKSAPTPQFHFGQGLSYTTFALKGQPSFTSCFSSAEETAVSVSTQVENTGNRDGKQVIQVYVTFPSCNVNHRPVKELKAYHKVRVPAGQAKSVMFKLDKYAFSYFDAEEGKWRIPEGEFLVHLAFSSTEVLQTFSVTNATPQFWTGL

SEQ ID NO: 274 - protein, 718 aa, Modestobacter marinus
MAGDTTAPAELDRPWTNTSLSPQERARELVAAMTLEQKIAQLHGAMDTIDIYSMKADTAEGMEQLAAQIRVERHVAAIEELGIPRFRITNGPVGVGMGDGTPSPPATALPMTIGLAAGFDPALAREYGTVIGSETATLGQHVLEGPGVCLHRTPISGRNFEYFSEDPYLSGVMGVEVARAIQEHGVIAMAKHYVCNDQEYERFRADVEVDERTLRELYLLPFEMLVKDADLAAIMSAYNRVRGTYATEHRYLLHTVLREEWGWQGYVQSDFWSCRSAAPAVNAGLDHEMPDAKWLNEDNVKAALADTSLEIETVDRALVRRYTQMFRFGQFDRPYDPGEIDAEGHGAISRRIGEQIAVLLKNDGAVLPLEPGVQSVVVIGQATYVDEACLGGGGSSKVDPLYTVRPMDGLRDVLQTLGSSADLREVTVADDLSNLAEAQAAAATADVVVIMAGLVATEGADQPDAHMLNDQDRMIAEVGQVNVRTVVVLKDGNPVLMPWIDAVPAVLEAWNQGAEDGHVVADLLFGVVNPAGKLPTTYPRSWADTPFAGHPERYPGTDEGAGYPVLRYSEGRQMGYRWYQAQGITPLFPFGHGLSYTTFELSDLAVSPERTDGAAPLTVQLTVANTGDVAGAEVAQVYLELPEAAQQPPKRLVGFCKIWLEPGAAERISVTIDPAATNHPLSVWDDGAHDFVVLPGEYTVFVGSSSEDTPLSATVTID

SEQ ID NO: 275 - protein, 804 aa, Lactobacillus equicursoris
MLKNQKLLEQLTLKEKALLMAGQGEWQTRAIKGKLKSIFLSDGPFGLRKQSGAGDHLGLNGSEPATCFPSSATLANSWDPAVGRAVGRALGREARRLEVDQVLGPALNIKRNPRGGRSFEYFSEDPYLAGKMAAGMIQGLQENGTIATPKHLAVNSQETRRMASNSVVDQRALHEIYLTNFEIAVKEGKPKSIMSSYNEINGSYANESKWLLTDTLRKDWGFDGYVVTDWGGDNDHVSGIKAGSNLAMPGLGVNAAEEVVQAVEKGELSEEVLNQRVDELLTVILEAQAKPAAGNFSWEEQHAVARDAAKKSLVLLKNKDQILPLAKGTKVALVGDFAKNPRYQGAGSSLINSRDLESLLATAKDYPIDLVGYAQGCPRQGEAKPELLKEAMSLADKCDVYVVNVGLDESAESEGLDRPNLSIPPCQADLLEALAKTGKPIVLVLSGGAAIELPWEGKVNAIVHEYLGGEAGASAVWEVLTGKYNPSGRLAESYPLTETDIPFDNEFPAEKHNAYYKESIFVGYRYYETAGVKVKYPFGYGLSYTTFAYSNLEIDDQGASLDVTNTGQVAGKETVQLYIGKEDSPLLRPKRELKGWAQVDLEPGETKRIKIPFDEYSFRYFDQSLETWQEEKGHYQIMLGRNVADVVLTGEYDLKRGIVPKESSSSYGKYREGKLLLVTDQDFADLYGAKLPKNLPAGRRELEWNDPLREMANAKSWLGRAVAKWLANKIQQSLDESKPDLNFLFNYNMPFRAMTKMMGDMISRPMAEDILFIVNGHFWRGTGRLIRDYFQNNRKVKNDKDVQE

SEQ ID NO: 276 - protein, 657 aa, Colletotrichum fructicola
MTSYPKVNGAYVDDQTTFLKDILRDEWKFKGLVMTDWGAASAAVANGIRNGLDLEMPGPPHRRQPAVVHKLIEDGKVDVEDIDDRVLPLLRLLRQTGKFTDRREPVPERAISRPEHEKLIREAGGEGVVLLKNSDGTLPLKPSHLQNIAVLGPLAKHAAAHGGGSASLNCHYKISPFDAIKSRLPDSKLSYSKGAHVFRAYPDFVAGTKNRLGNSGFAADFYENLDLIGKPFYTEEYPRGSFITLMNDNVVSAKSARLSTDYSPDISGKHYLSFSGMGPARLFINGEFQGEIKETAEAMSFLLGVQEEQHLQYDFVVGKTYSIVIESTISPVPNAELYLADDQIAVHLGFVSQQEMEADLLSEAVSFATDADVALIFVGNTPQWETEGQDMATMTLPADGSQDKLIAEVAKVNSNTIVVITTGVPVELPWLDNVAAVVQAWYGGQETGNSILDVLLGEVNPSGRLPMSWPKKNEHTACYGHFGLDSWDSREVEYVEGVNVGYRHFDSQYGTEREVLFPFGYGLSYSTFEHSACVLSGTLDVNDENAKITVAVTVHNTSDVAGSEVVQVYVTPPKSRTGVERPPKSLVAFDKIHLNPGAQKEIQLSFKRDGAAFWSEAGRLWEVEAGEHEVHVSTSSCPKDIKSTLVLDVTEGFTFRP

SEQ ID NO: 277 - protein, 458 aa, Streptosporangium roseum
MTATEERDPGAGAFPAGFVWGTATSAYQIEGAVDEDGRGPSIWDVFSRTPGAVAAGESGAPACDHYRRWPEDVALLAGLGVGAYRLSVAWPRVFPEGDGRADRRGLDFYRRLVDALHGHDIVPFVTLYHWDLPQALEERGGWRVRDTAERFADYAAAVHEALDGVPYWITLNEPYCSSIVGYAEGRHAPGAREGHGALAAAHHLLVGHGLAAGRLRERARQGEQVGVTLNMSPSVPAGPSAEDAAAARRMDLMVNRQFTEPLLGAAYPEDMSEVYGEISDFSFRRDGDLALVSAPLDFLGVNYYYPIHAAAAPYTQPDPALRSAFDIGVRTVAPDGPPTSGLGWRIEPRGLRDTLTGLAARHPGLPPVFITENGYGDRGETDDTGRVDYLREHLAATAEAIAEGVDVRGYFCWSLLDNFEWARGYDARFGLVHVDYATQARTPKASYHWYRDFIGGHM

SEQ ID NO: 278 - protein, 743 aa, Listeria grayi
MKKEKLEALFQTLTLEEKIGQVVQVSGNVYMEDKQTIDTGPLQDIGFHSDFQLDLIGSVYNVNDWRQIKKIQTEYLHKHPKKIPLLIMADVIYGFRTINPIPLAQAGSFDFELIQKGATETAKESYRNGLHVLFSPMLDLVRDPRWGRVMESPGEDVYVASQYANSIVTGYQGELNEEKTIEEDHVAAGIKHFAAYGAPEAGREYNSVDMSLLKLRQTYLPPYEAALKANAKLVMTAFNLLNGIPATANKFLNRKILREENNFDGVLISDFAAIEELVDHGYAKDKQTAAQKALEAGVDIDMMTSCYANELQSLIESDQLPMELLDEAVRRILVLKNELGLFENPYRGLEAETAGEILTATAKQTAIELVEKSSVLLKNDQQLPLEKPEKLAVIGPYGTSKLTLGFWASVTGSPLDTISLAEGLQQHFPNQQLLLSKGYNLFDDYEAFGPLKEAVIQLNGPIDAENELVQEAVEKAKQADKILFTFGENFMESGEGASKAHLDLPEKQLHLLRELKKTGKPIVGILYTGRPLVLTEVATLFDSLLLVWYPGTMGGIGISNLLTGKANPSGRLAMTFPRAEGQIPIYYAHHSTGRPMGTSNQQPRFTSRYTDEANEPLYPFGYGLSYSSFQITTDSAAVHCRAGDTFSFKLAIQNTSQVDGEEVIQFYIQAAASEIVRPVQELVGSKRIFVRAKSVEEVEIEVDSNSLGYVNESGEHVLEKGSYRYLIATSSDNVHKSISIVIE

SEQ ID NO: 279 - protein, 708 aa, Enterococcus italicus
MNEKNLLELMNNLSIEEKVGQLIQITPDFFDSEGEVTGPAQAWNLDKRTLYQVGSVLGTHTREQVEMIQKNYLQRSKHKIPLLFMADVIHGYEHIFPIPLALAASFDEKVVEKMAHYSAKEAADAGIHVTFSPMADHVTDARWGRVLESSGEDPRLAARLTAAYVRGYQGESLNDPNKIASCVKHFVGYGAAKGGRDYNEANLSDVELYQNYLPAFQQAIEAGAKFVMTAFQSVSGVPMTANRPLIQHVLRELLKFEGVVISDWGAVQELCAHRVAENSSEAAKLAFQAGIEIEMMSNCYHEHLEHLVSENGWEELLDQVVWRILTVKNELNLFENPYRSMNSRVQSNEYRKVNNEIALRTPVLLKNEHQVLPLKKNEKIILLGSKADSQDVLGAWSWIGKQEMAISLKQGLVDGGNDTLTFIKGTPSERLQDAEVVKAIQEADKIIVAIGETSGETGEAASKVHLRVPFEDQLWLDELHKMGKVTIAVIFAGRPLVLTDIEPKVDGLVMAWFPGSEAGHILAQLLTGDFDFSGRLPMSFPQNEGQLPLTYQQMETGRPLTQTNYQEKYLSKYLDCSNDPLYEFGFGLQYATVSWKNIQLSTNQLSDECSTRLTMTVSNDTDIQTHSIVQLYMRDEVTTVVRPMIELLDVKVVKLEPNQKVIVTFTIDKKDLQYVHADLTKQIELGKVTFFIGESSKRIVWSAPCFVG

SEQ ID NO: 280 - protein, 878 aa, Fluviicola taffensis
MKYFLCFLLLIPITNTFGQLYKDSTQSVDVRVKDLLSRMTPEEKFWQVFMIPSDGDTTNEKLKHGIFGLQISAGSGGDAGGQLLNYNTTENATILAKKVNRLQAYFVTQTRLGIPIIPFDEALHGLVRHGATAFPQAIGLAATWDTTLIHQVATQIALECKMRGIRQILSPVVNLATDVRWGRTEETYGEDPFLTSEIGLAFIRSFEQQGIITTPKHFIANVGDGGRDSYPIHLSEWYLEQSHLIPFKRIIREGGARSIMTAYNSLNGTACSSNDWLLNQKLKKQWGFKGFVISDANAVGGEVVLHNTASSYAESGAHAINGGLDVIFQTDYNHAALFYPAFQSGLVDSNRLNDAVSRVLRAKFELGLFEKPYITIPKSSNSISSQGKKLSQQAAEKSFVLLKNKNQVLPLNPSVHKIALFGMDASQPRLGGYSGPGNNPLSILDGLKAIAGDSIQITYQETVSYSDTLFTPIYDKYLENETGNGLIGLYFDNVNFTGNPVLSRTDSQIDFNWTLYGPSNELENHFYSVKWTGNLIAPESGKIDIGLEGNDGYRLYLNDKIVIDRWEKTSYHQDLIPIDFVKGKKYPIRIEFKEPKGNGKIRLIWNYSINSSFDSELKKAIKATKKADVAVIVVGIHEGEFQDRASLRLPGNQERLIQELHKTGKPMIVLLVGGSAITMDEWISDADAIVSLWYPGEAGGLAVANLLTGKINPAGRLPITFPISEAQLPLTYNHLPTGRSDDYYNLSGEPLFPFGYGLSYTQFSYSDLKLAENNITKDESVDLSFKLTNTGKRAGEEVVQLYIKSKGSAQAQPIIALKGFQRISLNSKESKIIHFTLNPQLFTHISPDLKEIIESGNYELLIGSSSRDLQLKAVLTIQ

SEQ ID NO: 281 - protein, 755 aa, Shigella flexneri
MSLVLQPALADDLFGNHPLTPEARDAFVTDLLKKMMVDEKIGQLRLISVGPDNPKEAIREMIKDGQVGAIFNTVTRQDIRAMQDQVMELSRLKIPLFFAYDVLHGQRTVFPISLGLASSFNLDAVKTVGRVSAYEAADDGLNMTWAPMVDVSRDPRWGRASEGFGEDTYLTSIMGKTMVEAMQGKSPADRYSVMTSVKHFAAYGAVEGGKEYNTVDMSPQRLFNDYMPPYKAGLDAGSGAVMVALNSLNGTPATSDSWLLKDVLRDQWGFKGITVSDHGAIKELIKHGTAADPEDAVRVALKSGINMSMSDEYYSKYLPGLIKSGKVTMAELDDAARHVLNVKYDMGLFNDPYSHLGPKESDPVDTNAESRLHRKEAREVARESLVLLKNRLETLPLKKSATIAVVGPLADSKRDVMGSWSAAGVADQSVTVLTGIKNSVGENGKVLYAKGANVTSDKGIIDFLNQYEEAVKVDPRSPQEMIDEAVQTAKQSDVVVAVVGEAQGMAHEASSRTDITIPQGQRDLIAALKATGKPLVLVLMNGRPLALVKEDQQADAILETWFAGTEGGNAIADVLFGDYNPSGKLPMSFPRSVGQIPVYYSHLNTGRPYNADKPNKYTSRYFDEANGALYPFGYGLSYTTFTVSDVKLSAPTMKRDGKVTASVQVTNTGKREGATVVQMYLQDVTASMSRPVKQLKGFEKITLKPGETQTVSFPIDIEALKFWNQQMKYDAEPGKFNVFIGTDSARVKKGEFELL

SEQ ID NO: 282 - protein, 767 aa, Unknown
  Actinomyces sp.
MAQSDTYLDPAAPIDDRVNDLLARLSVQEKAGQLTQYFYLRSMHPASDGADPADLPTEHRRPPSQPAMVEAEIRAGRAGSVLFVRDPATRNELQRLAVEHGPHRIPLIFGYDVIHGLRTIMPVPIAMAASWDPAVLEAAQASAAEQARAVGISWTFAPMVDIARDPRWGRIVEGAGEDPYLGAACAAAQVRGFQGGPDIGREGRVLAGPKHFAGYGAARGGRDYEDSEISDNELWNVYLPPFKAAVDAGAGNVMSAYMDLCGVPACGNRWLLTDVLRGTFGFEGFVVSDADAVQSLTTQHFAEDLTDAGARALMAGLDMEMGRDDAAYKRLPEALGAGLITVEALDTAVRRVLRAKFAMGLFENPYVDVEAAPAVLADPAHRRVARTAAESTLVLLKNRPGPDGSRVLPLGARGSIAVVGQLADSPRDTLGPWVFDYDPAEVTTILAGIRERAGSDVRVDYAVGEWAPPRRFPSMFDEQEPAGSLPVRPDDFDDEAAIDEAVRLASGAGVAVVVVGQAQNCIGEKASVSTLELPGHQLDLLTAVAATGTPTVALVMSGRPLDMRWADENLPAIMQVWYPGTCGGRAVAAALFGDVDPAGRLPFTWPRTVGQVPMIYSHDRTFQPEGAGERYWDEESTPLYPFGHGGSYTSFEYSRPRVSAQTIAVGEAVSVDVDVTNTGARDGEEVVQLYIHQRHGRSSRPVRELKGFRRVAVPAGRTITVEFGLGPDELSYWSAASRTHVQDSSTTVDVYVGGSSLAEATTSFEVR

SEQ ID NO: 283 - protein, 833 aa, Verticillium dahliae
MVVELDVEALLKKLTNSEKVDLLAGIDFWHTKALHKHGIPSVRLSDGPNGVRGTRFFDGVKAACFPCGTALGATFNTALLEEAGRKMGEEAKLKGAHCILGPTINMQRAPLGGRGFESIGEDPVLAGLGSAAICNGIQSTGVQATPKHFVCNDQEHRRNAVQSILTERALREIYAMPFQLTVRDSKPGAFMTAYNGVNGVYCSENPDILEKMLRKEWGWDGMVMSDWYGTYTTTDAANAGLDLEMPGPPRFRGELLKFSVSTDKVKQHVLDERARAMLVFIKECMKLGIPENAEEKTGDTPETAELLRRIGGESLVLLKNENSVLPLKKNKKTVIIGPNAKIATYHGGGSASLAAYYAVTPFDGISQKLESEPIYAQGAYSHKLLPLLGNVVKSPSGERGMVFRAYTDPPNVTSRKPVDERILTNTELNLVDYYVIKNPLWYAEVEGSFVAEEDCEYELGLIVCGTANLFVNGKLVIDNETKQRQGDAFFGTATVEERGTTELKKGETYTFKVQFTSAPASKLQGNNVVFGGGALRIGGCKVIDDKEEIRKAAELARDADQVVICSGLNADWETEGHDRDHMDLPGYLNKLISTVGKANPNTVVVNQSGTPVTMPWINDVAAVIQAWYGGNETGNAIADVLFGDVNPSGKLSLSFPIRVQDNPAFLNYRAEFARTFYGEDVYIGYRFYEYIDRPVLFPFGHGLSYTTFEFSDLAVSDQNHNLKVELSVKNTGSINGAQVIQVYVAPRQKATKVNRPLKELKGFGKVALEAGETKKATINLSPKYAASYWDEDRHQWCAEEGEYEIIVADSSVVTDKALRGSFTVAETYWWSGV

SEQ ID NO: 284 - protein, 790 aa, Unknown
  Actinoplanes sp.
MTTEQVTPPWRDPSLPVADRVEALLAAMTLEEKVAQLGSRWVGNDMGDTGEDQGYDPEEQHNVAPMQDVFAAGGSIALADAARHGLGHLTRVYGSVPRTPAEGAAELVEQQRVVMASRLGIPAIVHEECLTGFTAFGATVYPAAIAWGATFDPELIERMAAAIGRDMAALGVHQGLSPVLDVIRDYRWGRVEETIGEDPYLVSLIGAAYVRGLQSGGVIATLKHFAGYSASRGARNHGPVPMGRRELTDVVLPPFETAIRAGGARSVMNSYSDVDGVPAGADPWLLTELLRDEWGFTGTVVSDYWAVPFLATMHGVAEDDVDAGAQALIAGIDVELPDTIGFGAGLIERVRRGELSERYVDRAARRLLTQKAELGLLDPDWSPEKSVAAAPLTDLNAAGNQALAAELAERSIVLLEPGTALPVTAAGRIAVLGPCADDARTFLGCYAFPNHVLPRYPQLGLGLEIPTALDGLRAEFPAGEITYARGCEVTGDDRGGFAAAVETARDADLAVAFVGDLAGLFGKGTSGEGCDAADLRLPGVQPELLEELLATGTPLVVVVVSGRPYALGDLDGRVAGLVQAFMPGQAGGAAIAGVLSGRVQPAGRLPVQIPRHPGGQPGTYLQPILGATHAEVSNLDPRPLYDFGYGRSYTAFAVGDLRVSADTVPTDGEFTVTVRVRNTGERDGAEVVQLYLADPVAQVTRPVRQLSGFRRVELAAGAAADVTFTVHTDRTAFTGRDLRRIVEPGELRILVGTSAGDLPCSATVRLTGPTRAAGADRRLTTGVQVRPIAS

SEQ ID NO: 285 - protein, 848 aa, Gibberella zeae
MGSIDKDYAPSRLPLEDSVSLLSGEDFWRTTPNKALGLGSLKFSDGSNGVRGEDWINGAPSAAIPCGTALGASFDVELVSRLSNLLARECKRKGVHGLLAPTMNIHRYPLCGRNFESFSEDPLLSGLIAASFVQGLQAQGIATSPKHFLANEAENGRRWSDSVIQERALREIYLEPFRIVVQKADPWAIMTAYNSVNGSFCSESKTLLSILRGEWHYNGVVISDWFGTYSTVEAFSAGLDLEMPGPTKFREQDKVLGLLKRDEIEKRQIRDSASRVLDLLQKTGRIGQPGHPPPSKAEEPEYLDNLETRTLLRQAAESSMVLLKNEGSTLPLVNRRTKLAVFGRHATEPSLFGGGSASIKVPYSSTPWDAIQETYHDAALGPGVAIERLVPLPNECGLELGDITLTWYNGDTVSDSARFFSQQLKDTLYMLVEHAPGGLIDRSNFCTSMKFVFTAQHTGPFHISLSGPGNAQCLVDGEIVLDVQRGLDISTEDFLFDRSKLEVSRDKPLQLQAGLRYNFEVVNWSSKHKAQNVNREFFIQGCRLGLSPARDDDKALIDAERLVETVETSIVVVGTGTEWESEGFDRVSMQLPRRQDELILRVAEKCKGRTIVVVNAGSPIDMSGWIDHVDAVVYAWFPGMEFGSALARLLSGEVSPCGRLPTTFWDKVEDYPAGYVEELMTADRKIQYREGVFVGYRQESLQSYTPRFSFGHGLSYTTFSCSVKSHTASLVQNSPSFTDRIILTLQNTGSITASETVLLFMEAIDPTTTRPRVELRGFAKTRLLEPGHSQDLEFILKPRDFAYWDEKAHLWRIDSGSYKVHVAGSRGVGDWRDIEDVIVKFAEGITIP

SEQ ID NO: 286 - protein, 860 aa, Auricularia subglabra
MTAAEFAKADIDAIVEKLTIEESTALITGVGWWHTAAIPRLGVPAIKVSDGPNGVRGQHFFNGSPAKCIPCATALGATWDPELVRELGARILAPEAKLRTASVLLAPTVNIQRSPLGGRSFESFAEDPVLSGTLASAYINGVQSEGVACTIKHLVCNDQENARMGSNSIVSPRALREVYLLPFQIAQRDAKPWAIMTSYNLVNGTHASENRELIEGILRGEWGFDGLVMSDWYGVYSLDQSIKAGVDLEMPGVRNWRTPNLIERGLVSHKLTVDDLKARARKVLETVQRASKHIPEVVDRSVGAEDPPTEFAEDVALLRRAAAASIVLLRNEGGVLPLDKSKLKRVAIIGPNAKTRTIYGGGSAQIRSLYAVSPYEGIVRALGNDVQVSYVEGVRSFKSLASLDYELVNPDGKRGWRMEYYNHSAEHPEKALDTPVRVFDVTETSIRLNDHKLDFLTPQWSLKLRGSLTPRDADGEFEFGLTVSGRAKLFVDGQLVVDNWTKQRKGPHFFGRGTEEECGKIAVRKGVQYDILVEYSNISGPTETDSSTGAVFIPCVRLSGAPVVDADEQLRAAEEAAKAADVAIVVVGLNAEWESETFDRTTLALPARTDELVHRVAKANARTVVVNQSGSAVDMPWVTEVPGVLQAWYLGNSAGDGIADVLFGEVNPSAKMSLTFPRRLQDVPSYLHFGGKEGPVHYSEDLFVGYKHYVDREIAPLFPFGFGLSYTSFEYSGLKLSQTTLAATNAADLALAVTISISNTGSRAGTEIVQVYVSPPPHPLGEPLPSRVLRGFARAADLKPGESRNVTVALDKYAFSSWDEERKAWVVRKGTFGISVAASSVDIKFTATVDVSKTLYWNGV

SEQ ID NO: 287 - protein, 446 aa, Nitratireductor indicus
MQTKELAFGRGDFPEDFVFGAAASSYQIEGCRFGGCGLSHWDTFAATPGNTVRFEDGATACDHYHRWEEDLDLMRGANLDCYRFSISWARVLPEGRGAPNVAGLDFYDRLVDGMLERGLKPFATLYHWDLPVALADLGGWRNRDIAQWFADYADLAMKRLGDRVASAATINEPWCVSWLSHFHGEHAPGLRDIRATARAAHHVLLAHGRATEAMRALGMKNLGLVTNFEYAEPADGGPQAQKAARLYDGIYNRWFLSAVFQRSYPQDVLEGLLPHMPEGFEKDFDVIAAPVDWLGINYYTRKLITADGSGRFPGFKDVPGPLPKTQMGWEVYPEGLYHFIEWTHRNYTKGLPIYVTENGMASADRVSAGGVEDADRIAFLNQHLAQAKRALDQGVPLKGYIVWSLLDNYEWALGYEKRFGLVHVDFETLERTPKASWHALADALRR

SEQ ID NO: 288 - protein, 751 aa, Thermoclostridium stercorarium
MTLKEKIALCEGKNFWETRDFPQYGIPSIFMCDGPHGLRKQEVTGREPSGVNESRPATCFPAAVSTACSWDEELLGKIGAAIAEEALDQGVGVFLGPGVNIKRNPLCGRNFEYFSEDPYLAGKLAASYIKNAQKNGIATCVKHFACNNQEYRRFNSDSVIDERTLREIYLTPFEIAVREGRPKAVMCAYNKINGVYCSDNKVLLTDILRNEWGFEGVVITDWGAMNDRIAAFKAGCDLNMPGGSNYMEQEVLDAVARGELSEAEIDRSAERIKKMVREAYEVLGNRTGCDYNAHHELARIAAEQSAVLLKNEDDILPLKEWQKIAIVGDMAGNMRYQGSGSSHINPTKLVQPADVLKSRASVEEADVAVVFAGLPPEYESEGFDRDSMEMPPEQVRLIEETAAKNPNTVVVLFCGAPVETPWADRVKGILYMGLPGQAGGEAVKNLLYGIANPSGKLAETWPIRYSDCPSAAYYPQRDGQYREGIYVGYRYYDKANVRVRWKFGFGLSYTEFAYSNPQINGETVKITVTNTGKRAGAEVVQLYIAPPHDGIHRPVKELKRFAKVFLTPGESREISFTLDNRCFAVWDGGWKVPEGKYTVLVGGNPDKLTVAGVVEKAGEKIKVPYWQPGSWYEKPFGPPPLEQWEKMIGSKYVPYTPQKGNFTMNDTLAEMKKDSFIMRILYWYVKISVTRGMKRGTAEYRMMVESSVGSPLRNLQISGGMSGKIFRGLLAIANGKYIKGLRTLLKNDGMY

SEQ ID NO: 289 - protein, 776 aa, Unknown
  Geobacillus sp.
MNGEIKFVKFFIMAFLLLSLILPYVKQDGAAYAKKSDKPLYLNPEAPIEQRVKDLLQRMTLEEKVGQMTQINVTRLMGTNEWDRGPLNPEWMKKIFVDNHVGSILSGGGAAPVPNNPEEWAKLTNDIQKYAMEHSRLHIPIIYGVDAVHGHNNVLGATIFPHNIGLANAWDPELVEKLSASTAKSVRATGIHWNFAPVADIGRDIRWGRFYETFGEDPYLASKLSAAAVKGLQGKKLSDQESVAATGKHFVGYSQPLNGQDRSPADISLRTLREIFYPSFQAQIESGVKTIMINSGSINGIPVHASKYLLTDVLRKEMGFKGVVVSDWEDIMKLHTVHKVAPSYKDAIRMSINAGVDMSMVPHDADNFTKNLIELVKEGKISMKRINQAVSRILTLKFELGLFENPYVDPKKAAEIINDSDRQLALQAARETMTLLKNEGNVLPLKKDVKSILVTGPSADNVANQMGGWTIGWQGATNPNELPPAVTILEGIKGAVSNNTAVKYVPGVPDEKDEKDPSKVKAAIDEAVKAALQSDVVIAVVGEKPYAEGEGNTETAELPAAQRQLIQALNETGKDVILVLVAGRPLMITDLVESTPAVLMAYLPGTEGGNAVADVLFGNYNPSGKLASTWPKSIGQVPIFYNHKPGTKYEPLFPFGYGLSYTTYEYKNLQVTNIISKKGEAKVSVDVTNTGKVAGDEIVQLYVNQEYRSVLTPVKQLAGFKRIHLNPGETKTVTFNLPASQLAIIPGDIIGTERPVVESGTYKVMVGNLTKTFKIE

SEQ ID NO: 290 - protein, 414 aa, Unknown
  uncultured bacterium
MTETRVPDFPDGFLWGSSTAAHQVEGGNTNNDWWAWEHKPGSPVQEPSGDGIDHLHRYDADYALLASLGQNAHRFSFEWSRIEPAEGEFSQAALDHYKRVLESQHRHGLTPFATLFHFTSPRWFADRGGWLAPGALDLFGRYAERVARALGDLVPYMGTVNEPQVVALMGYLAGGFPPGKQDLELAREANRTFAAAHRTAVAAVRSASSSTRVGTCLQIPYIEPLRPDDEADRAAAARMKGFFGDTHLDDLRTAGDAGDFVGLQYYGRDLIDATSPSFKAPPPEGAEVSSMGWEVHPDGFARVLREVAQVGLPIIVTENGIATEDDSQRVRYLAGHLRALASVVADGVDVRGYFHWSSFDNYEWGSYGPRFGLIGIDRQDGFRRVVRPSAVHYGDVARTGSLARLAAASLPLST

SEQ ID NO: 291 - protein, 731 aa, Burkholderia ambifaria
MKRVLMTPVDRDAGIEFSNPVLQSSLSSPMAALADPDERAREVEARMTDDERFSMLYSLMVRIFGTNARESRVPAHVPDIAGYVHGVPRLGIPPLLLADTSLGVRATHDVNETATALPAGLALGATFDPMLATAAGTLIGKEMRERGFNVALGCGINLVREVRNGRNFEYLSEDPLLSGKLGAGMVSGTQAEGVIALVKHVSLNASETNKFFLDAIIDPAAHRESDLLAFQIAIETGRPGALMGAYNLVNGEYACGNKQIIQDTIKDAMGFEGWVMSDWRAVNSWDYSLKGLDQHSGAQLDECEWFNEPLRRAFDEGRIPRTRIGEMVQRMLRSYFAVGIDRPSAAEPVDAAAHNDVALEIARKGIVLLQNRDAMLPLAPTVRRIALIGGFAQVGVLSGSGSSQVRPRGGYAAEIPFRSHPLLGATSMCFFGPSPLAQLRARLPGATIDFDSGAHIADAVALAEKAEVVIVNAIRHEGERFDCPDMTLPYGQDALIEAVARVNPNVVVVLQTGNPIAMPWRDKVRSVVPAWFPGQAGAQAIAEVLTGEVNPSGRLPVTFPVSVDQTPHPRLPGADVELGTPIQVRYHEGAEVGYRWFAQQGDMPMFAFGHGMSYTDFAYSDFSVSGGDTVTASFTVTNTGPRDGDDVPQLYLTHAAEATRMRLLGFEHVWLSAGGSVRVNMVADPRLLGCFDATSGRWRIAEGDYRIVLARSAAHHVVDATVRLEHREFGR

SEQ ID NO: 292 - protein, 856 aa, Aspergillus oryzae
MLTSPTARTSVRISRPATTERPNTVLTSGSLDIAMVQVVSRTLTPPTSNMKLSAALSTLAALQPAVGAAVQNRASDVADLEHYWSYGHSEPVYPTPETKGLGDWEEAFTKARSLVAQMTDKEKNNITYGYSSTANGCGGTSGGVPRLGFPGICLQDAGNGVRGTDMVNSYASGVHVGASWNRDLTYSRAQYMGAEFKRKGVNVALGPVAGPIGRIARGGRNWEGFSNDPYLSGALTGDTVRGLQESVIACVKHLIGNEQETHRSTPSMLANSRNQSSSSNLDDKTMHELYLWPFQDAVKAGAGSVMCSYNRINNSYGCQNSKAMNGLLKGELGFQGFVVSDWGAQHTGIASAAAGLDMAMPSSSYWENGTLALAVKNESLPSTRLDDMATRIVATWYKYAEIENPGHGLPYSLLAPHNLTDARDPKSKSTILQGAVEGHVLVKNTNNALPLKKPQFLSLFGYDAVAAARNTMDDLDWNMWSMGYDNSLTYPNGSAVDAMMLKYIFLSSANPSAFGPGVALNATTITGGGSGASTASYIDAPFNAFQRQAYDDDTFLAWDFASQNPLVNPASDACIVFINEQSSEGWDRPYLADPYSDTLVQNVASQCSNTMVVIHNAGVRLVDRWIENDNITAVIYAHLPGQDSGRALVEVMYGKQSPSGRLPYTVAKNESDYGSLLNPVIQSGTDDIYYPQDNFTEGVYIDYKAFVAANITPRYEFGYGLTYSTFDYSDLKVSTSSNVSTSYLAPGTTVAEGGLPSVWDIIATVTCTVSNTGSVAAAEVAQLYIGIPGGPAKVLRGFEKQLIEPGQQVQVTFDLTRRDLSTWDTEKQNWGLQAGSYALYVGKSVLDIQLTGSLSL

SEQ ID NO: 293 - protein, 793 aa, Yersinia pseudotuberculosis
MNLNKTGFFTAFTFLSAPVWAPPQLKEAESIPSVIAAMTLEEKAAFVSGTGMNNAEKVAGAAGSTLAIPRLGIPQIVFADGPVGVRLGAGPTGGEKRFATGFPVSVAMAATWDPAIIKRVGGAIGDEAKRYGVDLILGPAINIQRHPLNGRNFEYFTEDPLLNAIMTASYIDGMQTEGVGAVLKHFAANNQETRRQIVNEIISDRALHEIYFPGFEYAMEKAQPWAVMSSYPSINGTPSSQNPWLLKDVLRQQWKFDGFVMSDWYGVADPVSALKGGNDLNMPGGRTPDDSLFLTPNTDPKDVVLAALKSGELTQDQIDENIRNILNVVIKTHRFKNGDAAVMPEPVDHSALARQIAADSMVLLKNDAQTLPMKATFRVAAFGQNIDNFFVTGGGSAEVNIDPKRLVTLPQGLKNAGIALIRQIGDQTLDEPVNQPVITKAAQQSDIALISIGRSSTEGADRYSMAMHTAEVAMIQKVASAFHQQNKKVVVLLNIGSPIEMASWEQYADAILLTWQPGEQAGNAVADILLGKVNPSGKLPLTFPKRLEDSPSFGNYPGNAKTVIYGEGIYVSYRYFDTKRIAPMYPFGYGLSYSTVNYGKISPEKPVFNIDTENSIEVSIPVRNTSGIDTKEVVQLYVHDNASRLDRPEQELKAFEKVSLSAGEEKRVAFKLDKRAFSYYDEDKNNWVLEPGLFTLRIGRSSRDIHAETPLIVKSSTPAFSFDTPWIDIQTYEKAATIVARFIGDEQTNAWIYGNPTLGDKLEDALKLKPEFAKDEAKRQKLKQEILQEINSL

SEQ ID NO: 294 - protein, 842 aa, Wallemia ichthyophaga
MTLPELNVEELLQQLTVKEKIELLAGKDMWHTVNNTRLGIPSIRTSDGPNGVRGINFFEGTPSSCFPGATALGASFDNQLLERVGSALADECIAKGVHVLLAPTINIQRSPLGGRGFESYSEDPELSGTLAKYFVKGLQDKGVAATIKHYVGNDQEFERMSMSSEISERALREIYLRAFEIPLRESEHKPWSVMTAYNRVNGLHCSEDPRLLGDILRGEWGWNGMTMSDWFGTYSAGESTHAGLDLEMPGPSVVRGAALQRALTAKKVFIEDIDARVKNVLELINKVRKSGIDEATPEKVHDTPELRQTLREAAANGVVLLKNEENVMPIKKGTTKISVIGPNAESAIISGGGSAALRASYAVSPLDAIREQAKEIGAEVVYSRGGNAHKLTPLFGPELKTADGRAGVDVKFYGSDPAAGKAKPLHELYAHSSHLFFNDNLPGPETVPLTCWAEASGIFTPNKTDNYEIGIAGAGQTDLFVDGERVVDNSTNPQPGTLWFNSGSQERTVVKKLEEGKQYSIMARLYYSSEGAQAAGTLSPHSRGGIRFGISPSKSQDEFLQEALDACKGADLVLCFVGLNNDFESEGFDRPDMKLPDSANAFMNAISSAHSNTVAIVQSGTPVELPWVDKVKGVYQAFYGGNEVGNGLADILFGRLNPSAKLPLTMPVELRDSPSHLNFGGENGRVVYAEGVFVGYRHFATTGKKPLFPFGKGLSYTSFDVTNARVDQTSDSHDVLIRMKVTNTGSVAGREIIQLYVNDVESRLARPFLELKAYAKTNLILPGESEEVTLMLGKRAFSYFDDFKSRWVIEAGEFKLFVATSSAVEDIKHTLSYYVDKTSEFI

SEQ ID NO: 295 - protein, 853 aa, Glarea lozoyensis
MSAATSDTNNNVDIDALLDKLTLDEQISLLAGASTWETAAIDRLDVPSLKVTDGPNGARGETFLDGTTAACFPSCVSLAATFNRTLSRRVGKALGQESQTKGAYVLLGPTVCSHRSPLGGRNFEAFSEDPLLSGLLAAEYVKGLQSERVGATVKHYLANEQDTRRFSINETISERALREMYLRPFEIVVKSSAPWCVMTSYPKVNGIHVDSSKMFIQDILRDQWKFDGLVMSDWGATTSTKDSINAGLDLEMPGPAKWRSLDAVKAAVDAGSVTSKTIAGRARAVLQLLHRTGKFSDRKEAVSETAIDKPEHRSLIREAGAEGLVLLKNTDSILPLDMRNCKKLAILGPLAKYAAAHGGGSASLNCHYKVTPFDAFTARLGAETEILHSKGAHIYRVYPELEAGCTNKEGKPGFTTEYFANEELEGKPFYSQGFPRGYFMTMMDDKASGKKSVRLTTSFVPDTSGNHYLSYSSMGTSKMYINDTVISEQKQSTKDSMAFLLGTQEENRFRYSFTKGQVYKIHVDAWVPAELNGELYLFDGHIAVHLGFVSQEEMERDVLTEAVDLAKKADYAILFVGNTTQWETEGQDMEDMNLPADGSQDRLITEVAKVNSNTIVVNTTGVAVSVPWLDEVSALVQAWYSGQETGNAILDVLFGKVNPSGKLPISWPRKYEDTAVCGNFGLDSYESREVEYVEGVYVGYRHFDKHFATERQVLFPFGYGLSYSTFSILEVSLEGRISNDTSDGVTISVNVENTGNLAGAETIQAYLAPPTINTIDRPLKGLVGFSKVFLSKGEKKSTTISFQKDSAAFWDVVKHKWVIERGTYKILVGTSSDPKDLKTSLKVDVPQTFSYEP

SEQ ID NO: 296 - protein, 850 aa, Moniliophthora roreri
MTKSNVDETLSKLTMPDKIRLLCGLGWWHTEPVPSLGIPSMRMSDGPNGVRGTQFFNGVPSSCFPSSTGLGSTFDIDLARQVGEALADECRAKGCHILLGPTTNTQRSPLGGRSFESFSEDPVLNGSIAAAYINGLQSKGVAATLKHYVANDQEFERFSVSSEVSERALREIYLKPFQIAIRESNPWALMSSYNRVNGLHVSENKWLLDDILRKEWGYKGMIMSDWIGVYSTAESIRAGLDLEMPGPTVMRGNAVMRALAAQKLFPSDIDDRVRKILELLEKAFASGIPFGAPEKPVDTPELRQLLRTTAADSVVLLKNTKNLLPLTSSSNIKKIAVIGPNAKTAFTSGGGSARLLESWKVTLLQGITAAAKEIDADVQYTIGATSHKMLPLAEDYVFQHGGQPGGVLEFWNEKPSEDFLSTKADIGNLNEGVVWSTTTKSTNCILLDGVNANKVDYNCYFRYTTTFIPDESGDWIFGVSVSGLGNVFIDGKLAIDLSNDPPKGNHLIGVGTAELCGIVKDMQKGQKYSLEIRISNLEFMAQIPIIPAWGGFRLGAMKVMEPEQAIKDAVKLAKESDVAILVVGLNHEWESENYDREDLSLPGLTNRLVTEVLAANPQTVVVNQSGSAVELPWADEASTVLQAFFGGNELGNGVADVLFGKVNPSAKLSLTFPKRLADCPAYPSYGNKTQDHGKVLYNEGVFVGYRGYQIKSIAPAFPFGFGLSYTQFEYSDLQSTPISSDGSFTVTLKVKNVGQINGREVVQIYISDPESSLARAKQELRGFKKVSLKAGETKEVKVELDRDALGFYDERRGSWVAERGKFGVLAGASSEDIRLRTEVELKDTLTWTGL

SEQ ID NO: 297 - protein, 896 aa, Zhouia amylolytica
MSEQFKAHLVRKITDKLMKKLSFIVVLLGVFCLNGQNKFPYQDASLPVEERVQDLLKRMSLEEKVRQMDMYRGENFKTDEKFDKKKTVGHINDLGVGAIHDIYPRSAKMINDLQKHVIKNNRWGIPALIMCEMLHGYVDDGATAFPMNIGLGATWDTELMYEVGRVIGTEARIRGVHYGLGPVLGIGREPRWGRVAETFGEDTYQASEMGLAMIKGIQGDTLASSTSIIAEPKHFAVHSYPQAGGNSSPIIVGERTAREDFLPVFEKAFVEGGALGTMCAYTELDGIPCAANEWLLTDVLRNEWGFKGIVISDLGAIKYVQTTHYVADSPKDAIKQSVAAGVDMQFYDFSNEFWQKTLVELVNEGDLSMDAIDRAAGGVLRLKFLLGLFEDPYTDAKLFDKLYHTEKHQNIALQAAQKSVTLLKNDGNLLPFNDDVKSIAVIGPNADETRLGGYAVRNKEAITVLEGIKEKVGDKVNVFYEEGVPLIIKGQIISSENLWTPDESSNGLKGEYFDNRSLKGEPVLTRVDDELEFDWPWSPGEGVPDDQFSIRWTGFLKPTTSFEGWLGLSSDDGVRMWVDDKLIVDNWTKGSTNIVTYPMNFEAGRKYKVRIEMWEGGWGARAHLRWNLKKVDFNPAVAIAEKADVAVVVIGESRELVEENRDVATLDLHGKQLELIQAIQKTGTPVVCVLLNGRPLSVNWIDKNVPSVLEAWFPGEKGGQAIADVLFGDYNPAGRLSITVPKSVGQLPIYYNQKPSAIHRYVEESEDPLYHFGYGLSYTTFNYDNLKLSAETIGKDESVEVSVNVSNTGDYDGEEVVQLYINDVYSSVTTPRKALKGFKRVFIKKGETKEVIFELTPEELAIWNRDMKRVVEPGKFQVMVGGNSMDTIKTSFEVTN

SEQ ID NO: 298 - protein, 642 aa, Fusarium oxysporum
MTAYNKVNGVHVSESKTLLQKILREEWKFDGLVMSDWFGTYSTTGSVHAGLDLEMPGPTLWRGPALSHAIMANKVTEEQLDNRVRNVLNLINYSRASGVPENAPEKRLNRPQDQALLRRAASESIVLLKNNDNVLPFVKSKTTAVIGPNAKITRFCGGGSASLLPYYSVSPYDGIAKQCGKVGFSQGAMDHQMLPQMGDVLRTDKGQRGFTWRAYNEPATIKDRVPLDERVLTDSNYFFLDYEHLDLAPVWYSQAEGIFTPEESGLYDFGLGVEGTGRLFINDALLISNIENQKPGETLFGSGTVEEKGSMEPVAGQDYKVRVEWGCFKTRRLPPSGPVGGRHGGLRFGACRRIDPAQAIEEAAQVAKSVDQVVLVVGLNGELESKGTDRTTMDMSAHTNALVSKVLAANVNTAVVVQSGTPVGMPWIDDAKAVCHVWYGGNETGNAIADVLFGDVNPACKLPLTIPRRLQDNPTYFNFRSEAGRVLYGEDVYVGYRYYEKIDCKPLYPFGHGLSYTAFSLQNLNVQVDDACRVTLEMTNTGSRAGAQVVQVYVAPPTTMAVARPVKELKTFRKVYLEAGEKRQITIDMDTVLSTSYWHEGRDKWCSERGEYRVLVGTSSADTPLEATFAVDKTRYWTGLAP

SEQ ID NO: 299 - protein, 450 aa, Flavobacterium johnsoniae
MNKIENSFLNKNQFGEDFLWGVSTAAFQIEGAHDSDGKGSSIWDVFTSQKGKIKNGHHALTACDFYNSYQNDIDLIRELNIPNFRFSISWPRIMPTGVHPVNQAGIDYYNKIIDSLLASGIEPWITLYHWDLPHALEVKGGWTNRESVNWFSEYVEVCAQYFGDRVKNWMVINEPSVFTGAGYFLGIHAPGKKGITNYLKAMHHVTLATAAGARILRNKVPEANIGTTFSCTHIEAATESAKDVEAAKRVDTLLNRTFIEPILGLGYPQKDLPVLKKLNNYILEDDLNNLDFDFDFIGLQCYTREVVKSSILTPYIGAELVSAEKRNVISTEMGWEVYPPALYHVLEKFNKYDKIKKIIITENGAAFPDTVTNGKVFDIKRTHYIQDHLEQILKAKKNGLNVEGYFVWSLTDNFEWAEGYNARFGLIHVDFETQKRTIKNSGLWFKDFLS

SEQ ID NO: 300 - protein, 504 aa, Oryza sativa
MAARRANCALVLVLALALLAARDAGAAAVPKPNWLGGLSRAAFPKRFVFGTATSAYQVEGMAASGGRGPSIWDAFAHTPGNVAGNQNGDVATDQYHRYKEDVNLMKSLNFDAYRFSISWSRIFPDGEGRVNQEGVAYYNNLINYLLQKGITPYVNLYHYDLPLALEKKYGGWLNAKMADLFTEYADFCFKTFGNRVKHWFTFNEPRIVALLGYDQGTNPPKRCTKCAAGGNSATEPYIVAHNFLLSHAAAVARYRTKYQAAQQGKVGIVLDFNWYEALSNSTEDQAAAQRARDFHIGWYLDPLINGHYPQIMQDLVKDRLPKFTPEQARLVKGSADYIGINQYTASYMKGQQLMQQTPTSYSADWQVTYVFAKNGKPIGPQANSNWLYIVPWGMYGCVNYIKQKYGNPTVVITENGMDQPANLSRDQYLRDTTRVHFYRSYLTQLKKAIDEGANVAGYFAWSLLDNFEWLSGYTSKFGIVYVDFNTLERHPKASAYWFRDMLKH

SEQ ID NO: 301 - protein, 715 aa, Clostridium saccharoperbutylacetonicum
MDKNELIDEEKIEKIISELTLKEKVAMCHGNGLFRTEGVKRLNIPPIKMSDGPMGVRAEFPDDSWMPIGNSDDYVTYLPCNTALASTWNVNLAHEAGRVLGNEARGRGKDIILGPGINIVRSPLCGRNFEYMSEDPYLISKLAVPFIKGVQENNDVAACVKHFAVNNQETERLKIEVEVDERTLKELYLPAFEAAVKEGNTYSIMTAYNKLFGYYCSHNEYLIKEILEDEWGFDGVVVSDWGAIHDTVEAAIAGMDIEMNVTYNFDEYFFAKPLIKAVEEGKISEEVINDKIRRILRLMYKINIFSDDRKSGRYNLPKHREKTLDIARESIVLLKNENNVLPLKDSKIKTLAVIGENANTMHSNGGGSAEIKALYEVTPLLGIKTRLGGQTEVKYAKGYSADKSEKEKLIEEAVELAKISDAVVIIGGLKHTAEDMELENNALTVSKDKEIKRYVDSEGYDKTDMDLPYNQDELINRVLEVNKNAVVVMLSGAPVKMTEWIDNAATVVQTWYNGMEGGTALAEILFGDVNPSGKLPVTFPRELEDSPAHKIGEFPGGEKVKYTEGIFVGYRYFSTYDVKPLFCFGHGLSYTNFKYEDLKISVNEEVADVDISAVFKLTNTGHIDGAETVQVYVKDAEASVERPKIELKGFDKVYLKAGEIKEIEIKLDKKALAFYSVEDKKWTVERGTFEIFVGSSSEDIRLNGEINLESSYKFK

SEQ ID NO: 302 - protein, 770 aa, Unknown
  Rhodococcus sp.
MTTRPDLTLEQQAALLSGHDFWSTEAIEEAGIPSVVLTDGPHGVRYQSGDSDHLGLHASLPATCFPLAVAVGSSWDRSVAEEVGRAVGREARALGVHVVLGPGVNIKRSPLCGRNFEYYSEDPLLSGVLGAAHVRGLQSVGVGACVKHFAANNQETDRMRVSADVDDRTLREIYLPAFERVVAEARPAAVMCSYNKVNGVSAAENRWLLTEVLREQWGFAGVVVSDWGAVADRVAGVTAGLDLEMPGSGGGTDRQVVDAVRDGRLDPRLVEASAHRVLALSDLVRPAAGDLDLDGQHALARRLAADCAVLLKNADGVLPLRRGQHVAVLGSFATTPRFQGGGSSHIAPTRVDPALDAVRALAAAHGLTVSAADGFPLGADGDARALLDEAVRVAAAADVAVVFAGLTEREESEGFDRDTLDLPPVQVALVRAVARAAPRTVVVLAHGGVVSLEGWHDEVDAILDGWLLGQAGGSAIADLLLGVATPSGHLAETVPLRLEDTPSYLNFPGEQGHVRYGEGVMVGYRGYETLRRAVRYPFGHGLSYTTFVTESLDVALGGDGTVAVRVRVRNAGDRAGKHVVQMYVATDAGPVRRPVRELRAFEKIELAPGEARDVELTLERRAFAYWDVELDDWVVAPGEYAIQVCADAATVLEARTVTLAGDVVSRPLSMESTVGEWFSHPTVGPAFLEVLAGATGSAPTPDPQEHAGLLRMVESIRMAQFLTFLPIPVPQEKLDELLALGGTVANSATDAAAGNRDHPAPTPPGQPGGP

SEQ ID NO: 303 - protein, 779 aa, Burkholderia ambifaria
MLLPVKRGDRSIFRLDAGVWRPVQQIDSGGSMKTSLFRCSTIASACALTMLLASCGGDDIHAPADPDAAADLRAAALVAQLTTDEKLQLVHGTGMPALNFGGPFPADALNGASYIPGVPRLGIPALSSADSAGGVNVKNARVTALPAPVALAATWDPALAGTYGTRIALELRALGFAEGLGGGVNLAREPRNGRTFEYMGEDPVLAGTLSAARTQATQAQKVIATIKHFAFNDQETNRMTVDSVVDERTMREAELLAFEIGVKDGQPGNVMCSYNKLNGVYACENPYLLTTVLKNEWGFKGVVQSDWGATHSTVAAVQAGLDEEQPGAADDGNAPLGSYFNSKLRAALQAGSVSAARLNDMVQRKLRTLIRIGVMDAPPKPGGAIDEAAGNADALAIARQAAVLLKNAAAPGDTQPVLPLAAGTLRSVVVIGGHADAGVLSGGGSGAVPAIDGNAVTSCQQPAGMLFGGCATWYKSAPLAAIRAKAPNASVSYRDGTDANAAATAAAQADVAIVFATQWQTEGLDLASLSLPDAKADLYNQQYDQNALIAAVAAKAKRVIVVLENGSPVLMPWLANVHGVLDAWYPGAQGGQAIADLLFGDANPSGRLPLTFPKQEADLPQPTIDPSNTQNVYAEGLAYGYRWFDAKAIEPLFPFGYGLSYTTYALSAMSARADAAGNVTVGVTVTNTGTRAGTHTVQIYAALPASLGEPPKRLVGWTRVALQPGEARTVSVAVPAQRFAVWDANAHAWRIGAGRYGLLAAASSRDPQALSQTVTLAAH

SEQ ID NO: 304 - protein, 753 aa, Xanthomonas campestris
MPQLDMKPFTSRHHRPRPLVLAVVMGLGIALAAPLAVAQGAPASQPWMDTALTPDQRADRLLAQMTEDEKFQMLRSYFGLGTDKIPKPEGALGSAGYVPGIARLGIPAQQLADAGVGVTNPGGIRKGDYATAMPSGPSTASSWNRQLAYTGGKIMGRESWQQGFNVLLAGSVNLQRDPRNGRNFEYAGEDPLLAGTMVGESIRGVQSEHVLSTMKHFALNDMETRRNFHSAQIGEQAMHESDLLAFEIALKIGDPASVMCSYNKINGTYGCEHDYLLNQVLKQEWKYPGYVMSDWGGVHSGSKAALAGLDQQSAGEVFDAAVFFDTPLRMAVSAGVVPRARFDDMVRRVLRSLFAHGAFDYPTQRQPIDGKAGLLAAQHVAEEGSVLLRNEQATLPLSQEVRRIAVIGGYADKGVMSGGGSSRVDYTINGGNAVPGITPTTWPGPVIIHPSSPLQALRAALPNAQIDYVDGTDRAAAARAAKAADVAIVFATQWAAESVDLPDMRLPDNQDALIEAVAKANPKTTVVLETNGPVRMPWAERVPAVLQAWYPGIGGGEAIANLLTGAVNPSGHLPVTWPVDESQLPRPSIPGLGFKPAKPGEDTIDYAIEGANVGYKWFAARKLTPRYPFGHGLSYTQFRMGGLQVEASGSQLTASFEVENTGSREGAAVPQLYVTLPDGHATPLRLIGWQKLTLKPGEKRSVQVVAEPRTLADFDAQARRWTIAAGTYRVQLARSASEPVQTAQVTLQAAQLP

SEQ ID NO: 305 - protein, 469 aa, Caulobacter vibrioides
MALGGAALGLSACEGPGETDLTPKGRQFPKDFVWGVATAAFQTEGSQTADGRGPSIWDVFERVPGHVKNGDTAADATDSYRRYQDDVDLIAGASLSAYRFSMSWSRILPTGAGAVNAAGLDHYSRLVDALLAKGITPYATLFHWDLPQGLQDKGGWANRDTAQRLADYARAVVERLGDRLKNYIILNEAAVHTVFGHVLGDHAPGLKDAALLGPVTHHMNLGQGLAIQALRAARSDLSVGTTMALQPCRPAGGPLAFWNRLASDGLDEIWNLAWLDPLFKGTYPKAMEEPLKGVVRDGDLKTTRQPVDFLGVNYYAPAYVRLDLSAPSKIAAAAAPNSAEQDAFGRHIDPSGLFEVLDRVRREYGAPKMLVTENGCSDPFSSGPAILDDTFRIKYLRRHLEAVLAAREAGCDVRGYFEWTLIDNFEWDLGYTSKFGITTMEAASGRRIPKASYGWFKALAQTGTLPSSP

SEQ ID NO: 306 - protein, 741 aa, Arcticibacter svalbardensis
MMIRSRVNKTVVCLFIISFFHVMVHGQMIQPQELKPLSNFQGFPSGSIYQNVNLAPELRARNVINYLSFDEKLSLTTGILGFCFPGIPRLGLRAVVMADASQGIRLSSIQSDTESVSFPSMQALAATWNPKIALDFGTAMGEQCKLHGVDVLLGPGINMQRTSEGGRNYEYMGEDPLLTSKIAVAYVKGIQAKGIVATAKHFICNDQEFVRHIASSDVSERTLREIYLPPWKALIEQAGLRAIMTGNNLVNSIPNTMNKPLLNDILRDEYHFKGLAMTDWQNTNYYPFQQYLVPISGISLLMPENKTFANYIKSYLTKYPDKLKKIENELNDMISYNLYTFFEAGIYDRGAVDVAMAKKVKLHEKLAEQCADESICLLKNEQDILPVSVRKKILLTGLPEIYSGKGSGFVKGFNHVDFESGLRSAYGNNLISEPKPTDEQIQKADVVIFRLSKEAGEGYDVPFIGADSSSTTIQKLCRLNKNVIVLVSSGNGIEMPWIQSVKGVLWTFMLGQQRGAALANVITGKVNPSGKLPFTLEKDIQDSPAPEFNFLGGKPYWHGSNRFYKDYWKGTDTTTAKIELAKYVKPNQLVHIPYTEGVFMGYRWYEKYNKPIQFCFGYGLSYTQFEFKNLKISRTSIPSKDSLIVSLQIRNSGKARGAEVVQLYLSDVKSSVERPLKELKGFQKIYLRSGEQQTIKFVIHPEDLAFWDENKNAWNAEPGDYEIMIGNSSQDIKLKHKFKLL

SEQ ID NO: 307 - protein, 768 aa, Winogradskyella psychrotolerans
MIKPLLKPMKIKLHRFFNYRLNILDPISKSIKITQMKKIIFALSAIIMITCAENTKNNTSDYKDKNAPIEDRIEHLISLMTLDEKIMQMNQWTYGKNANPNNIGEKMREVSPEIGSLLYRSTNPEYRNQIQKKAMTESRLGIPIIFGFDAIHGYRTIFPIPLAQASSWNTELVRESSAITAKESWLSGLDWTFSPMVDVARDARWGRVSEGYGEDTYANSAFAVAAVQGYQGSNLNEKYTIAACLKHFIGYSLSEGGRDYHYSDVSNQTLWETFMPPFEAGVNAGAATLMSGFNDISGIPASANHYTLTEVLKEKWKHDGFVVSDWGSVRNLVEQSVAKDLKEATQKAFMAGIEMDMVDNAYVDYLPELVAEGKVPMESIDEAVRRILRVKMKLGLFENPYVDVVSEEERYLLPEYLEVAEELASESFVLLKNENETLPITSKYKNLAIIGPMVKDSVHIMGFWEGMGRPEDVKTIYEGLEKEFKNKATLNYALGCDYDGDDTSGFDAALQAANNSDAIVLFLGEKRHWSGENGSRSTIALPKIQEDLVAALRKTNKPIILMLSSGRPLELIRLEKMADAIVEIWQPGTMAGPAVAGLLSGRHNPSGKLPMTFPQTTGQIPIYYNMRQAARPTLGHYQDIPRDPLYWFGHGLSYTTYDYSAIKLSSKKITKDQTLIAEVEVTNSGNLDGKESVLWFLKDPFASISRPIKELKHFEKKSIKAGEKVVYRFEIKPERDLSFVDSQGNRHLESGDFYVIINDQKVHFELVE

SEQ ID NO: 308 - protein, 732 aa, Methyloglobulus morosus
MKTKETHLEENTVSTQVKHLLSQMTLEEKVGQMTQIDFSMVGVFEAQDAKHPIDSEKLEEAVIKHHVGSILNCPSTPHNKAQPIETWRHMMQEVEGVSAKTRLKIPVIYGIDAIHGATYTKNAVLFPQAINMAATFNTELSFKEGEITAREVRASGQHWNFAPVMDIGRQPLWPRLWETYGEDVHLATAMGTAYIKGHQGDNFSEPTKVPTCLKHYVGYSFPINGKDRTPAWIGERMLREYFLPTFEAGVKAGSPTVMVNSAEVDGIPGHANYHYLTTILRDEMGFKGFVVSDWEDIKRLYTRDKLAASPKDAVKIAVMAGVDMSMVPFDFSFYGLLLELAQSGEVPMSRIDEAVRRILTVKYQAGLFEHDRKQLPVESNFATPEATAINRQAARESIILAKNSNQILPVKKEANILVTGPTADLLSVMNGGWTITWQGHAEELYPQDKLTVLKALQKKSLGKITYLNGDVRADEKAIDKVVAEAKHHDVVLLCLGEQPYTETVGNIETLALEPTQMELAEAAINTGKPVILLTLGGRPRIITSIANQAAGVILGFLPGMEGGEAIADIIYGDYNPDGKLPITYPRNTNGITLYDHKPMESFEGNVYNPLFPFGHGLSYTTFATDGLAVDKEQIKWDENVTVTVNVSNIGTRLGKETVLLYIHDVAASVTRPNKQLKAFQKVELEPGEAKKLSFTLSPYDLSFIGVDLKRVVEPGEFRVMVGNETANFWVTE

SEQ ID NO: 309 - protein, 808 aa, Pestalotiopsis fici
MNPKAVGWESAYAQARDFVSQLTLLEKINLTTGVGWENGPCVGNTGSVPRLGFKGICNQDSPQGVRYADYVSAFTSGQLAAATWDRGLLYARGVAMAEEHKGKGATVQLGPVAGPLGRVPEGGRNWEGFAADPMLTGVAMAETIKGMQDTGIIASAKHFIGNEQERFRQVGEAAQYGYNISDTLSANINDRTLHEMYLWPFADAVRAGVGSILYSYTQINNSYGYQNSKTLNNILKGELGFQGFVVSDWGGHQSGVSSALAGMDMSMPGDTAFDTSYTFFGTNLTVAILNGTMPSWRLDDMAMRIMAAYFKIGNTIEDQPDVNFNSWTTQTNGFKYAFGKEDWEQVNWHVDVRSNHSELIRTVAAAGTVLLKNDGALPLEKPKFIAVFGKNAGPSPISPNGCPDRSCDKGTLAIGWGSGTSEFPYLITPDSVIQARVVANGGLYESIFNNSDLDSIHALASRPDATYIIFGNADSGEGYLNVDGNEGDRNNPTFWQNADGVIHNISATCNNTIVVIHSAGLPGEQSGNSLIDILYGNVNPSGRTPFTWAKRREDYRADVLYEPNNRGGAPQQEFVEGVFIDYRHFDQNNIEPAFEFGFGLSYTTFNYSDLKITRKNITAYQPTTGTTQAAPVLGANYSTNLEDYKFPDTWQWILAYCYPYVNDTSSLEAASMDPYYNSSLDFIPEHAQDGSPQALVGAGDEVESGGNKMLYDVFYEVQASITNTGPLAGYEVAQLYLSLGGDNPPKQLRGFDRLWVEPGETVIFNASLTRRDLSNWDTFTQNWVINDAPKTAFVGSSSRKLFLEAALE

SEQ ID NO: 310 - protein, 864 aa, Capronia coronata
MPSQGNPSRDVEHLLSLLTLEEKVSLLAGADEWQTQGIERLGVGVVKTTDGPAGARGKLMVDGPRAAFLPAPVLQAATWSKADLKWIGQLLCKEAKTKGAQVLLAPTMCGIRNPLGGRNFESFSEDPFLSGSLAIEYVAGLQETGEVQATAKHFVANEQEFERFSIDAIIEEKALREIYLRPFEMLVKSSTPPGCIMTAYNCVNGVHMDMNTRIVQGILRDEWKFDGLVMSDWGGTNSTIESVIAGCDLEMPGPGVRRGQKLLDALKSNKSADLPAAVDECCKRVLTLAKRMNLLGLSEAEVKASRRRPEISATTAADLQSLRKIVSYGHVLLKNSSGTLPLSPNTLQRKKVAFVGPNSKTCTAGGGGSASMNPQYQSHPLDAFKATTAKLGLDVEVHYAMGAYSNKWLPLTSSDQWSAQSSQQGQSMFKLEFFANADFGGPVVDTQYRNNSSIDLTDSGPASLREVAKPYSVRATSYLRPTASGKHNLSITSVGDSRLFVDGKLLIDNYNWTERGEAFYAFSSVEVSAAMEMTAGQTYNIVIETASRMSGEVDRDNPVHVWSMQPSVRVGYLEELPRDMVSEALTLANRCDYTIVAIGLTDEWESEGYDRQTMSLPGNQDQLVQTLLEQANRPESIIVVNQSGSPVEMPWAEQAPTILQAWYGGQEAGNALADVLLGLTSPSGHLPISWPRRYADLHFSNHAEVWPGVGGRVVYSEGTNVGYRWYLNEGVDPQWWFGHGLGYTSFTTSVVEVINHPQDQGWDIVVDVHNTGSFDGQQVVQVYSWPEQDPKAKELRAFEKTGSLRPGTKQRVTICVKMRDMAHWIEGQWVLEAGKYLLGLGEHAGAVDVVAAVDYVPQTTVWGV

SEQ ID NO: 311 - protein, 860 aa, Aspergillus aculeatus
MKLSWLEAAALTAASVVSADELAFSPPFYPSPWANGQGEWAEAYQRAVAIVSQMTLDEKVNLTTGTGWELEKCVGQTGGVPRLNIGGMCLQDSPLGIRDSDYNSAFPAGVNVAATWDKNLAYLRGQAMGQEFSDKGIDVQLGPAAGPLGRSPDGGRNWEGFSPDPALTGVLFAETIKGIQDAGVVATAKHYILNEQEHFRQVAEAAGYGFNISDTISSNVDDKTIHEMYLWPFADAVRAGVGAIMCSYNQINNSYGCQNSYTLNKLLKAELGFQGFVMSDWGAHHSGVGSALAGLDMSMPGDITFDSATSFWGTNLTIAVLNGTVPQWRVDDMAVRIMAAYYKVGRDRLYQPPNFSSWTRDEYGFKYFYPQEGPYEKVNHFVNVQRNHSEVIRKLGADSTVLLKNNNALPLTGKERKVAILGEDAGSNSYGANGCSDRGCDNGTLAMAWGSGTAEFPYLVTPEQAIQAEVLKHKGSVYAITDNWALSQVETLAKQASVSLVFVNSDAGEGYISVDGNEGDRNNLTLWKNGDNLIKAAANNCNNTIVVIHSVGPVLVDEWYDHPNVTAILWAGLPGQESGNSLADVLYGRVNPGAKSPFTWGKTREAYGDYLVRELNNGNGAPQDDFSEGVFIDYRGFDKRNETPIYEFGHGLSYTTFNYSGLHIQVLNASSNAQVATETGAAPTFGQVGNASDYVYPEGLTRISKFIYPWLNSTDLKASSGDPYYGVDTAEHVPEGATDGSPQPVLPAGGGSGGNPRLYDELIRVSVTVKNTGRVAGDAVPQLYVSLGGPNEPKVVLRKFDRLTLKPSEETVWTTTLTRRDLSNWDVAAQDWVITSYPKKVHVGSSSRQLPLHAALPKVQ

SEQ ID NO: 312 - protein, 721 aa, Thermotoga neapolitana
MEKVNEILSQLTLEEKVKLVVGVGLPGLFGNPHSRVAGAAGETHPVPRVGLPAFVLADGPAGLRINPTRENDENTYYTTAFPVEIMLASTWNRELLEEVGKAMGEEVREYGVDVLLAPAMNIHRNPLCGRNFEYYSEDPVLSGEMASSFVKGVQSQGVGACIKHFVANNQETNRMVVDTIVSERALREIYLRGFEIAVKKSKPWSVMSAYNKLNGKYCSQNEWLLKKVLREEWGFEGFVMSDWYAGDNPVEQLKAGNDLIMPGKAYQVNTERRDEIEEIMEALKEGKLSEEVLDECVRNILKVLVNAPSFKNYRYSNKPDLEKHAKVAYEAGAEGVVLLRNEEALPLSENSKIALFGTGQIETIKGGTGSGDTHPRYAISILEGIKERGLNFDEELAKTYEDYIKKMRETEEYKPRRDSWGTIIKPKLPENFLSEKEIHKLAKKNDVAVIVISRISGEGYDRKPVKGDFYLSDDETDLIKTVSREFHEQGKKVIVLLNIGSPVEVVSWRDLVDGILLVWQAGQETGRIVADVLTGRINPSGKLPTTFPRDYSDVPSWTFPGEPKDNPQKVVYEEDIYVGYRYYDTFGVEPAYEFGYGLSYTTFEYSDLNVSFDGETLRVQYRIENTGGRAGKEVSQVYIKAPKGKIDKPFQELKAFHKTRLLNPGESEEVVLEIPVRDLASFNGEEWVVEAGEYEVRVGASSRNIKLKGTFSVGEERRFKP

SEQ ID NO: 313 - protein, 750 aa, Clostridium saccharoperbutylacetonicum
MINRESKQKEFIKQYYEKRIDDLIGKMTLEEKVGQLVQISPSIFGAFGLTFDETIEKLINGEITPAEFEALERNYREDEIRQGTLGCMGGVHGAEKSNELQKIAVEESRLGIPILFGLDVIHGYRTIFPIPLAEACSFDIEKIKESARIAAKEASAAGLHWTFAPMVDISRDPRWGRVAEGAGEDPYLGSVIAKARVEGFQGESLDNPESILACAKHFAGYGAPDGGRDYNTVDMSLQTLHDVYLPPFKAAAEAGVGTFMSAFNDLNGIPCTVNKYLLTDVLREKFGFNGFVVSDANSIPEVVVHGYAEDNKAASKKALNAGLDMDMSQGTYRNELPELVKEGDILEEVLDEAVRRVLRVKFLLGLFDNPYRTDAKKEEKTLLCKEHLEAARDISRRSIVLLKNENNALPLKKDLKKIAVVGPLAENAAEMLGTWSHTGNPSDVVTIISGIKAAVSTETEILYAEGCKITGEECIDFEGAVRVAKESDVIIAVVGENSDMSGEAASRIDINLPGKQEELLKELRKIGKPLIVVLINGRPLTIPWEAENVDALVEAWQLGTQSGNAIADVLFGDYNPSGKLVATFPYSVGQVPIYYNNPMTGRPAGKIKFTSKYIDGPAEPLYPFGFGLSYTTFKYENLSILSAENKIGDTVAVKVYVTNTGEVSGEEVVQLYVSDVVASRVRPVKELKSFEKVLLQPKECKTIIFKLNTKDLGFHDENMNYVVEPGLFKVYVGTNSKECLEGEFTIVALD

SEQ ID NO: 314 - protein, 464 aa, Schizosaccharomyces pombe
MGLNKQDLYIYRKQYGVNLGAWFCAERWINDFLFTGEGSSELEAVSGNVKAHGIDKARENFEAHWKSWIGIEDFSYMKQHLVNSVRIPLGYWSLGNDELVKGTPFEPYAEVYRNSLHILCEKIQEAGSLSIGVLLDFHGVYGGGNCDGHSGTSSGKAEFYEKQEYQDRTVEAVKFLSSKIGQFENVIGIQVINEPIWGQYDVLANFYQKARSVVPSYLPVYIGDGWDKDHWVNWVNDHESEGFYVVDHHSYFCFGGELCHAPPKLITRRLDTGEEYGKTKLSNIVIGEWSCTLSQESWSQTKLHDKRRRDFGEAQLNQYLNYCGGCFFWTYKFLHGKGGDWDFRSVVEDKVINYPPPPPTENKAMPALLEQSRDQNFGGHCYYWDQKQHDHPYEHDLYVKGWNQAWEDYIEFLQHGAMIGFPRAWTQKRMTSISSASAWEYRDGMNAAWLHLERMGFLNPFRHP

SEQ ID NO: 315 - protein, 729 aa, Phaeosphaeria nodorum
MRYSTVGNGTTSSAWASAYARARDVVAQLTLEEKSNLTHGVSGPCVGQTGAVPRLQIPELCFADAPAGVRGQEFVSAFPAGIHLGATFDRGLMLKYGQALGKEYRGKGIHVALGPFIGPIGRIVRGGRNWEGLGSDPYLNGIGGGAITKGIQEKGVIATPKHWIAQEQEYRRRPGEEGEAVSSNVDDRTLHELYAWPFGDALSAGAGSIMCSYQRINNSYGCQNSKILNGILKEEMGFEGFVVSDWDAQHAGVASANAGLDVVMPVPKFWGGNLTDSVKNGSVTTERLDDMNARLLAAWFYLNQDEGFPENAVYPYNVKHEIVDVREDHGSLIREIGAAGTVLVKNVNNTLPLKHPRFLNIYGYDAEVKAQPWNNNARFGGGYEENFGWSTLNGTLITAGGSGSSTPPYVISPFKAIQDRIIADRGTLRWDFFGVNPTVYANAEACLVFINTYASESFDRTSLTDEFSDTLVNNVATNCSNTIVVIHSAGVRTVDAWIDHPNVTAVLFAGVPGQESGHAIADVLYGDLNPSGRLPYTVARKESDYGHLLNSTFEPEIPAFLQSNFTEGLYIDYRHFDAQNITPQYEFGYGLSYTTFSYADLIVEPVSNGSLSAYPSPSVPIVQGGHPELWETVYRATVNITNTGKVAGHEVAQLYLGVPNSPKKQLRGFERVGLLQPGESVEVEFLLHRRDLSIWNVVSQNWELQKGTYPVWLGASSRDVRQESEIVVQ

SEQ ID NO: 316 - protein, 815 aa, Xylella fastidiosa Dixon
MERRTARHRPQRLRHSISPSHWPGSKLEHRPTATLGTVTSTEARAKFNLTGGPGKDHPRYAGLTLWSPNINIFRDPRWGRGMETYGEDPYLTSQLAVSFIRGLQGNIPDHPRTIATPKHFAVHSGPEPGRHSFDVDVSAYDLEATYTPAFRAAIVDGHAGSVMCAYNALHGTPACASDWLLNTRLRNDWGFNGFVVSDCDAIEDMTRFHFFRQDNASASAAALKSGDDLNCGNTYRDLNQAIARGDIDESTLDQALIRLFTARQRLGTLQPREHDPYAAIGIKHIDTPAHRALALQAAAQSLVLLKNSGNTLPLTPGTTLAVLGPDADSLTALEANYQGTSSTPVTPLIGLRTRFGTAKVHYAQGASLAPGVPSTITETALRNHGHPGLKGEYFDTIDFSGPPHLVRQDRIIAFNWDHVAPAPGMNPHRYAVRWTGELLPPGPGTYTFAVHVARCFDCNGHDPVRLYIDDRQIIPDNATAAQATTAPQQTDNTHLEATLHFTDTRPHHIRLDMEHRGEDQGVRLEWLAPEAPQLAEAERAVAHADAIVAFVGLSPEVEGEELHIDTPGFSGGDRTTIDLPATQETLLQHVKTTGKPLIVVLMSGSAVALNWAQHHADAILAAWYPGQSGGTAIAQALAGDVNPGGRLPVTFYRSTQDLPPYISYDMTGRTYRYFKGQPLYPFGYGLSYTQFAYEAPQLSTATLKAGDTLTVTAHVRNTGTRAGDEVVQLYLEPPHSPQAPLRNLVGFKRVTLRPGESRLLTFTLDARQLSSVQQTGQRSVEAGHYHLFVGGGQPNTGAPGGTAAFSIIGRALLPK

SEQ ID NO: 317 - protein, 832 aa, Schizosaccharomyces pombe
MMEHDVEDLINQLDISEKAMLLSGTDLWHTAAIPRLNIPSIRLSDGPNGIRGTSFFNSSPSACFPCGTALGATFDKKLLFEVGEYLAEEAKAKGVSVVLGPTVNIHRGPLNGRGFESFSEDSTLSGLAASYVILGLQSKNVQACIKHFVCNDMEDERNSVSIDVSQRALREVYLMPFQLACKYSNFKSLMTSYNKVNGEHVSQSRILLDNILRKEWEWKGTIISDWFGTYSLKKAIDAGLDLEMPGKPRFRNVNTIQHLVGSKELSESILDERAKNVLKLVKHSWQNTEAENHCELNNDSSCLREALKKFASQSIVLLKNKKKLLPLSRKGTFAVIGPNAKVCNYSGGGSANLKPYYTVSMYDGIAAKIDGVPEYALGCHNYLNLPNIANLLVNPRTGKHGYVAKFYLEPATSENRTLIDDYDLEDGVVRFYDYCNDKMKDGYFYIDIEGYLIPDEDAVYEFGISVFGTALLFIDDVLLIDNKTKQTPTNHTFEFGTIEERNSIYLKKGRKYNVRVEYGSAATYTLSTNLSPSTGGRYSIGCVKVIDPETEIDYAVRVAKSVDCVILCVGLTAEWETEGEDRKTMTLPSLSDKLVYSILQSNPNTVVVTQSGTPIEMPWISEAHTLLHIWYNGNELGNALANIIFGEQNPCGKLPITFPKKLKDNPAYLSFRSSRGHCVYGEDVFVGYKYYEAVEREVLFPFGYGLSYTTFELSNLYLKNCGERLRIDLEISNTGPMSGAEIIQVYISQIVRSVNRPVKELKEFSKVVLCPKETKLIRIELDIKYATSFYDELNEKWCSEEGEYNVLVGTSSKDIALTGKFTLPKTIHWTGL

SEQ ID NO: 318 - protein, 740 aa, Arcticibacter svalbardensis
MRKSFLFILVFILFNTLLFGQKQTYKFQKTNLSFEERSVDLVSQLTLEEKVAQMMNTAPAIPRLGIPAYNWWNEVLHGVARTSYHVTVYPQAIAMAATFDPDALNRMADYSALEGRAIYNDAIASGKAGERYVGLTYWTPNINIFRDPRWGRGQETYGEDPYLTGTLGKSFVKGLQGDDPKYLKAAACAKHYAVHSGPESLRHVFDVSPSDYDLWDTYLPAFKELVVNASVAGVMCAYNAFKGQPCCGSDQLMMDILRNQWKFKGYVTSDCWAIDDFFKNHKTHPDAASASADAVFHGTDIDCGTSAYLALVDAVKQGIITESQIDVSVRRLFMIRFRLGMFDPVAMVQYAQTPKSVIESEDHQAHALKMAQESIVLLKNENNTLPLSKNIKKIAVLGPNADNSISILGNYNGTPSNIVTALKGIKEKVGNQVEVTYEAAINFTNDFEGEGKDSSGVGSNEKAHFAALVNRVKDADVIVFVGGISPQLEGEEMKVDYEGFNGGDRTSIQLPRVQTRLMKALQETGKPVVFVMMTGSAIAIPWEAEHIPAIVNAWYGGQSAGTAIANVLFGDYNPSGRLPVTFYKADADLPAFENYSMDNRTYRYFKGKALYPFGYGLSYTTFAYTWKQQPAKKEYKGKDKISCTIKISNTGLMDGSEVVQAYIEYPQTNTVLPLKELRQFDHVFINKAGSKELNIEIPVEALKKWSTEKKELRLVPGDYHLIIGSHSSDKKLSFAFKLIE

SEQ ID NO: 319 - protein, 850 aa, Colletotrichum gloeosporioides
MTAAPSDKELLALLSQLTTAEKVLLLSGKSTWETPEIERLHVPSLKVSDGPNGARGAQFTDGTTAACFPACVSLAATFNRSLARQIGVALGEETQTKGAYVLLGPTVCPHRSPLGGRNFESFSEDPFLTGELASEYVVGLQSQRVAATVKHFAINEQDTRRFTVNETVSERAMREIYLRPFEIVVKKADPWCIMTSYPKVNGAYVDDQTTFLKDILRDEWKFKGLVMTDWGAASAAIANGIRNGLDLEMPGPPHRRQPAVVHKLIEDGKVDVKDIDDRVLPLLKLLRQTGKFTDRREPVPERAISRPEHEKLIREAGGEGVVLLKNSDGALPLKPSHLQNIAVLGPLAKHAAAHGGGSASLNCHYKISPFDAIKSRLPDSKLSYSKGAHVFRAYPDFVAGTRNRLGNPGFAADFYENLNLTGEPFYTEEYPRGSFMTLMNENVVTAKSARLSTAYSPNVSGKHYLSFSGMGPARLFINGEFQGEIKETAEAMSFLLGVQEERHLQYDFVTGKTYDIVIESTISPNPNAELYLADDQIAVHLGFVSQQEMDADVLSEAVSFAKDADVALIFVGNTPQWETEGQDMATMTLPADGSQDKLIAEVAKVNPNTIVIITTGVPVELPWLENVAAVVQAWYGGQETGNSILDVLLGEVNPSGRLPMSWPKKNEHTACYGHFGLDSWDSREVEYVEGVNVGYRHFDSQYGTEQEVMFPFGYGLSYSTFEHSACALSGTLDANDENAKITVAVTVHNTSDVAGSEVVQVYVTPPKSRTGVERPPKALVAFEKIHLNPGAQKDIQLTFKRDGAAFWSEARKLWEVEAGEHEVHVSTSSSPQDIKSTLVLGITKGFTFHP

SEQ ID NO: 320 - protein, 559 aa, Unknown
  uncultured bacterium
MTIYDQLRQPPFNLDDAAIDWVRDTYASLDLDDKVGQLFTLIMMGTDETEFDRIASLRPGGVTRFFTPDLDFERRTISNLVARSKVAPVISADLEGSRHSFAFGTPVLGQLGLAAVDDVEATQMSSEILAREGRAMGVRWSFTPVIDINAAFRSPIVGTRSYGSDVERIERHAVAHVRGLQQNGIAATAKHWPGEGYDDRDQHLVTTTNPLSMDEWMRTFGRLYKTLIAEGVVSVMSAHISLPAYVRSKMPDAGLEAFRPASVSKHLNLDLLRGELGFNGIIVSDATPMGGLSSWGHHIDTMPDLIANGCDMILFSDAPEEDMAAVKAAVETGRISEERFQESVLRILALKAYLKLFQPTDVLPDAEEARRVLAHPDSVAASKTYIARSPTLVKDVDGIFPLDPSKTKRILFVDGGINHPLIPQPLQFVVPDLLRKEGFEVTLDRPDIVPGPDDFDLVLYALGDESLLVRGRIFVDWHRMGGGGLFKAMYRPWTNIPSVMISFGHPYHLYDAPRVPAYINAYSTMDSVQEAVVDCMLGRKPFAGTNPVDPFCGLEDARY

SEQ ID NO: 321 - protein, 495 aa, Xanthomonas arboricola
MVAFNEIAGIPATANRWLLGEVLRGEWDYRGLVVSDYTGDLELIGHGFASDAREATRLAFLAGVDISMQSGLYLQHLPALVAAGEVTMAQLDASVRRVLQFKAELGLFDNPFLRIVPARAQARQRRPDSLALAREAARKSIVLLKNDGELLPLKTQGQRIALIGPMARNWTDSAGPWTLFGGDDSGNDLATAVRARLGNPSSLQVVEGCDFEHGLPGGVQAAVTAAASADVAVLAIGEPMRYSGEAQSRSEIVIPAVQQALLAAVAATGTPVVVVLSNGRALVIDGPVLKAPAILVGWFLGSASGAALADILFGAHGPSGRLPVSFPHTAGQVPYSYAHKPSGRADPRPDALQPFKTRYRTAPNAALFPFGHGLTYGRIEYGELRLSDARMAAAGSLRISARIHNRGTRDAEEVAQLYIRDRSASITRPVRELKDFRKLAVPAGGSAVVEFVLQRADLLFVGQTLAPTVEPGVFDVWVAPSAEAEGVSASFELMG

SEQ ID NO: 322 - protein, 820 aa, Fusarium oxysporum
MDVQATLKTLSLQEKVRLLSGTPDDFVSIAGIPEKGIAPLKTADSISGIRPSEFNSTLTTACFPNTACIASTWNTELLEKMGAELTRQAKIKHAQMILGPTINIQRDPRAGRNFECFSEDPLLSGFMAAAIVNGIQSKGYGACAKHFVCNDSETQRRYYNVDESPNGRALREIYLAAWSFLLRKSNPAGVMTAYNKVNGAFCCDSETLIEDILRKEWGYKGIVMSDWFGTRSTVAAMKAGVDVEMPVPVFRGERLIKAVTSGEISEEVIDASVSRLLDLRNRTQAAQSEGPEKSEIIQETNDIARKLAQEGIVLLKNENQTLPLPAATGLRIGVVGEYAKKAVFTGGGSASCNPQYRQVPLDLLREALSNEHTVSYASGVRMRRIIPTVPTEIVTTDKGKKGVEVTYHNSGQDEPVLVETLEDAAINLMAQGKPGLKTPGSHVKMTTNLVPETTGTHTLAVRHSGSFTVEVNGICVLKGGAPDITTEQFLFNLIKLESRIELPMEAGKSYHISVTMQSRESVVGEPTPYGLTLSFEEEYSEEQAILDAIEVAKTSDITIIYAGRSEQYESEGFDLDEITLPANQVAMIKAVAAASKKTAVLLHCGNPIDISSFVDDVDAVVNMHFPGQEGPQAMVDILTGKVNPSGRLTATWFKTLQDWPSFGNFPAQKDEGGGFTIKYVEGLEIGYRGRVPESRVQFPFGHGLSYTSFSYDGLNARLDASSNSSILTISVSVTNTGSIAGKEVVQVYICPPQNGADWRPTRELKGFTKVQLSPGETREVFVQIEVDTFNSHWSEDSHAWAVDEGEYGVEVGDQRATLMI

SEQ ID NO: 323 - protein, 448 aa, Paenibacillus polymyxa
MTIFQFPQDFMWGTATAAYQIEGAYQEDGRGLSIWDTFAHTPGKVFNGDNGNVACDSYHRYEEDIRLMKELGIRTYRFSVSWPRIFPNGDGEVNQEGLDYYHRVVDLLNDNGIEPFCTLYHWDLPQALQDAGGWGNRRTIQAFVQFAETMFREFHGKIQHWLTFNEPWCIAFLSNMLGVHAPGLTNLQTAIDVGHHLLVAHGLSVRRFRELGTSGQIGIAPNVSWAVPYSTSEEDKAACARTISLHSDWFLQPIYQGSYPQFLVDWFAEQGATVPIQDGDMDIIGEPIDMIGINYYSMSVNRFNPEAGFLQSEEINMGLPVTDIGWPVESRGLYEVLHYLQKYGNIDIYITENGACINDEVVNGKVQDDRRISYMQQHLVQVHRTIHDGLHVKGYMAWSLLDNFEWAEGYNMRFGMIHVDFRTQVRTPKESYYWYRNVVSNNWLETRR

SEQ ID NO: 324 - protein, 845 aa, Kluyveromyces marxianus
MSKFDVEQLLSELNQDEKISLLSAVDFWHTKKIERLGIPAVRVSDGPNGIRGTKFFDGVPSGCFPNGTGLASTFDRDLLETAGKLMAKESIAKNAAVILGPTTNMQRGPLGGRGFESFSEDPYLAGMATSSVVKGMQGEGIAATVKHFVCNDLEDQRFSSNSIVSERALREIYLEPFRLAVKHANPVCIMTAYNKVNGEHCSQSKKLLIDILRDEWKWDGMLMSDWFGTYTTAAAIKNGLDIEFPGPTRWRTRALVSHSLNSREQITTEDVDDRVRQVLKMIKFVVDNLEKTGIVENGPESTSNNTKETSDLLRKIAADSIVLLKNKNNILPLKKEDNIIVIGPNAKAKTSSGGGSASMNSYYVVSPYEGIVNKLGKEVDYTVGAYSHKSIGGLAESSLIDAAKPADAENSGLIAKFYSNPVEERSDDEEPFHVTKVNRSNVHLFDFKHEKVDPKNPYFFVTLTGQYVPQEDGDYIFSLQVYGSGLFYLNDELIIDQKHNQERGSFCFGAGTKERTKKLTLKKGQVYNVRVEYGSGPTSGLVGEFGAGGFQAGVIKAIDDDEEIRNAAELAAKHDKAVLIIGLNGEWETEGYDRENMDLPKRTNELVRAVLKANPNTVIVNQSGTPVEFPWLEDANALVQAWYGGNELGNAIADVLYGDVVPNGKLSLSWPFKLQDNPAFLNFKTEFGRVIYGEDIFVGYRYYEKLQRKVAFPFGYGLSYTTFELDISDFKVTDDKIAISVDVKNTGDKFAGSEVVQVYFSALNSKVSRPVKELKGFEKVHLEPGEKKTVNIDLELKDAISYFNEELGKWHVEAGEYLVSVGTSSDDILSVKEFKVEKELYWKGL

SEQ ID NO: 325 - protein, 860 aa, Ilumatobacter coccineus
MTGTSTGARRGIICGVIDIDAALNALSLADKCRLVAGETNWRTKAFPEAGIPQLKMSDGPTGIRGEGHGSAGTPGVAVPAGITLGASWDPDLLGEIGDLLGREAVRKRAHVLLGPTVNLHRTPIGGRTFECYSEDPELSGALAASYVRAVQRHDVAVTVKHFVCNDTEIDRMTVDVDVDERPLRELYLRPFERAVKEGGAWGIMTAYNRVAGEFAAQNRRLLTDILRGEWGFDGFAVSDWFGVHEPVGAANAGLTLEMPAPVRVYGDRLLAAIEAGSVTEETVDGLVRDLLGVMNRTKADERNCDEPELSIDDPAERALTRRAAIGGTVLLRNEPIDSSGHPVLPVALDGLASMAVIGPNAVIDRSMGGGSASLTPFDHRTLLDALSDRVGPDTDVRYEPGVRIDRLTPIVRSARLRTPDGADGLRLEYVNGTDWDAPATIDTVTSSSMIRFFGTTPDEIDATAFGARVSGSFVPEIDGPHEIGVVSTGPVTMTARTGDGDPIVVVDDPDMLLPRTREFFGYGSEESVATVECRAGEPVHLEVKWRTSAENGFAALRIGVRPPEPSDLIDRAVAAAAEADVAVVVVGTNDEWETEGFDREVMSLPGRQDELVERVVAANPNTVVVVNAGSPVSMDWAADDHPRPAAAIVTSFFAGQEQAEAMVDVLTGVADPAGRLPITYPQRLADTPAFEHHEPVRSAGRPPQQRYAEGLFIGHRHYEANDVAPRFWLGHGLSYGSVEWSTPTASRTSDTAASLDDSPIVVSLSLTNTSDRDATSVVQCYVAPIAPSVERPVRELKAWAKESLPAQARRDVSIELGSSAFRHWDEESGAWKVEPGEYDIVVATSADPDDEHERLRITIT

SEQ ID NO: 326 - protein, 459 aa, Unknown
  Agrobacterium sp.
MTDPNTLAARFPGDFLFGVATASFQIEGSTKADGRKPSIWDAFCNMPGHVFGRHNGDIACDHYNRWEEDLDLIKEMGVEAYRFSLAWPRIIPDGFGPINEKGLDFYDRLVDGCKARGIKTYATLYHWDLPLTLMGDGGWASRSTAHAFQRYAKTVMARLGDRLDAVATFNEPWCAVWLSHLYGVHAPGERNMEAALAAMHHINLAHGFGVEASRHVAPKVPVGLVLNAHSAIPASDGEADLKAAERAFQFHNGAFFDPVFKGEYPAEMMEALGDRMPVVEAEDLGIISQKLDWWGLNYYTPMRVADDATPGVEFPATMPAPAVSDVKTDIGWEVYAPALHTLVETLYERYDLPECYITENGACYNMGVENGQVNDQPRLDYYAEHLGIVADLIRDGYPMRGYFAWSLMDNFEWAEGYRMRFGLVHVDYQTQVRTVKNSGKWYSALASGFPKGNHGVAKG

SEQ ID NO: 327 - protein, 750 aa, Cytophaga hutchinsonii
MNKKQLLWILSIGTIVCGISCTKTEKPAADAIEKIISEMSLEEKVGQMTNLTLATIANEVDSTVVVDTAKLNDVILKHHVGSIQNVLTHAYTLNEWHSIIEPIQKLTLEKTRHKIPFLYCIDAVHGANYVYGATIFPHNIGLAATRNRTLVKEAGAITAVQTRAAGIRYNFAPVLDVGRNQLWSRFGETFGEDTYIATEMGLASIRGFEGGDVSSPLHVAACMKHFIGYSVPQNGKDRAPAYIPEIILREHFLPSFKAAVNEGTHTLMVNSGEINGTPVHASKYLLTDVLRTELGFKGVVITDWLDILKLKERHQVAETHKDAVYLAVTAGIDMCIVPFDFSFTDDLIALVKEGRISEERINESVRRILQLKKDLGLFEHPYLEEQAVKAFSDQAYSNTALQLARESVTLLKNENGILPLTDKQKILVTGPFANTLSELHGAWSYSWQGNIERLYPDTLNTIAEVFKKETPATSIFDLSAWTKSNGWNKGALIKAARAADVLVVCAGEAAYAETPGNIPDLAFDSVQVEVIKELSKTGKPIVLVLLEGRPRIIREIEPYCNAVVLAYWPGAQGAQAIYDVLYGRYNPSGKLPFTYPRYSGTLLTYDHKLLDEAVEIVEPYQYFYEFNPQYAFGYGLSYTTFSYSALKISSDTLVANDSLTVSITVTNTGKLDGQEVVELYSRDLVASITPSVKRLRRFEKIALHAGESKTVDFVLTKADLAFVGQDLKTVTEQGAFEISIQKQKTTIYYK

SEQ ID NO: 328 - protein, 463 aa, Thermobifida fusca
MSNDHLPEFPAGFWFGAATASYQIEGAVHADGRGPSIWDTYSHTPGLVLNGDTGDVACDHYHRYPEDVELLRRLGVDAYRFSIAWPRVMPTGSGDVNQRGLDFYDRLVDALLEAGITPVPTLYHWDLPQALEDAGGWRSRSTAEHFAAYTRAVVARLGDRIRHWITLNEPFCSAFLGYAVGRHAPGAREGTPALAAAHHLLLAHGLAVQELRAADAGEVGITLNPDRILPASDSAADRAAADRAETLHNRVWFDPLFAGRYPANEADVWGELADGSYRRDGDLEIIGQPLDFLGINYYRPLKVADGPLTEADPARRTAVDIRAHQQRFDGVRHTAMDWPVVPESFTDLLLDLTERYPNLPPIYITENGSAEHDVVSPDGRVHDTDRIAYLNDHLHALAAAIRAGVDVRGYFVWSLLDNFEWAFGYERRFGIVRVDYDTLERLPKDSYFWYQRLIEHHRARHRG

SEQ ID NO: 329 - protein, 780 aa, Botryotinia fuckeliana
MSLTLLTRASTSFQNWTHAHHLALTFVNQLNITEKSNIVTGTYHTSTLDGKPMNCIGNIGPIPRLNFTGICLNDGPALLLVRDLISVFPSGVTLAATWDRELVYQSYKALGEEFRGKGTHVALGPVAGPLGRHPLGGRNWEGFSPDPYLTGHLMTASITGMQSVGVQTSSKHFIGNEQETQRSNSPLPDGTNIDAISSNIDDRTLHELYLWPFADAVRAGTTSILCSYNRINETYACENPHLLNNILKGELGFQGYVVSDWFATHSGYPAANAGLDMDMPGYISQSAINTGETYFGPHLISAIQAGNMTEDRLDDMVTRIMTSYFLLNQSSNYPTPDPSQTYVMANMYGYDYGAQIPARDVRANHSSLIRQIGSAGTVLLKNTNNILPLSKPLNIGVFGNSAPDPTDGLTWPQSDLQTGFDIGTLDIGGGSGSARHTTLISPLTALRTRAATYARVQYLTNNALLSSSSSSSFAGIYPIPEICLVFLKTFSSEGVDRTSYPLDWNSTLVVNNVASFCQGNTIVITHSSGINTLPFAQNPNVSAILLAHYPGQESGNSIVDVLFGVVNPSGKLPYTIPVHESDMHIPVVNLSTSEVLAHHQSQNAWQSNFTEKLAIDYRGFEMKNVTPLYEFGHGLSYTTFNLTTPTPSIKHVTTQPITARPNPLSPILPGGNADLYTPLFTLTTRVKNTGTRTGATILQLYISLPETSTPEGTPKKVLRGFEKVEMRGGEERDVEFVLQRRDVSYWDTVLGDWVVPEGDIGVMVGFSVQDLRARVGVVVR

SEQ ID NO: 330 - protein, 739 aa, Agarivorans albus
MSQPYTNPSLSVAERVENLLSLMSVEEKVGQMLQLPANMPENLDKLESWNVGSYLHCTGTMVEELQQRAAKTRLGIPLIFGIDAIHGHCFENNGTVFPTQLALSCAWSKQLSQSMARITAIETRACGLHWTFSPVLCVGRDSRWGRINETFGEDPWLIGELAAAAVYGYQGDNLASHDTILACAKHYVAYGEATGGRDAYEAEVSPRKLLSLFLPPFEKAVKEANVATLMVGYQAIDGVPCSANSWLLREVPKNQWGMDGFIVTDWDNIGSLHDKQRVAEDLRHAAKIAVESGNDMIMTTPSFYQHTIDLVKDGELDIALIDDAVSRILKYKFELGLFEDFRYTDLSKKEQILGNADHWQAALEASRQSLTLLQNNGILPLSDASKPKILLCGANADDVVAQLGDWSFGSMQAGAADDSYHQKDAITLRQGLQAAADAGRCELSYVRGAAPAEAEFGEISSAVNAANNSDIIVACVGDTLSQHGEFHDRADLDLSGQQQAMLEALKATGKPLIVVFMASKPLTIGWVKQHADAIVCAFNPGAKGGQALSELLFGELNPSGKLTISFPQHVGQSPVYYNKYEGWHARLSERTDNQERYIDMPLLPLFSFGEGISYSEFSYSDLAVSTPCLAANKDLSQGEALKVSVNISNISQRSGVEIAQLYIHDCAASVTVPVLQLRGFERVELAPGETQRVEFSVPFADLALINTQLQKVVEPGAFKVFVGPSSKAEDLLSADFKVA

SEQ ID NO: 331 - protein, 745 aa, Unknown
  Enterococcus sp.
MIEEIVKKMSLKEKIGQLNQRLYGWQVYQKKEGKLYLTDYFKSEVARFGSIGWIYGVFRADPWSGKDATTGLSVEESREVSRMIQDYLKEHTRLGIPAFLTEECPHGHQGLAATTLPVNFSTGASWNPDLYQSVQTFVAQELRAKGAQVGLISTLDIVRDPRWGRTEECFSEDPYLASCFTQAAVKGMQGEILGHEPTTHVLAVLKHFAAQGSSMGGHNAGPVNIGEQELREIHLPAMLAGIQAGALGCMAAYNDWDGVPCHANPRLLQEILREEAGFAGVVMADGCALDRLADWLGNKPEAAARAMNSGVDISLWDNVFPQLEAAVDQGLIKQETIDQSVMRVLKLKEQLGLFDEPVPTVSVPDQKQFQESATRLAEEAIVLLKNEQVLPLKKQRQTIAVIGPHSKNSYHQLGDYTPFKELSECRNLWEGLLEIKGTETTFIQADGCGITEGTKEQLTAACQAAATADQIILTIGGSSIRDFSTDFDKNGAALQGSAEMTSGENIDLASLALPECQKRLITELKKFQKPLIGIVIAGRPHLLSEVSTAFDALLFAGYPGQFGGSALARILFGETNPSGKLAVSIPDENGQLPVYYNYREAAFQRDYTDCSGTPRYGFGYGLSYAEFMLKGIHAQYAPQAIQINGTIENLSVIAGAEVVQVYLRNYSQQVLPRVKVLCGFQKVFLPAKSTVDFSLTVSYETLKRLNISPNELPADFIIQVEAANQKQVFTKPLKQEENGKGEKSC

SEQ ID NO: 332 - protein, 460 aa, Salinispira pacifica
MAFREDFYWGASTASYQIEGAWNEDGKGRSVWDRMVNWDQKIAGGDTGNSACDHYHHLEQDISLMKDLGINAYRFSLSWPRVLPRGTGAVEERGVEFYDRLIDALLEADITPFITMFHWDYPLELFYRGGWLNPDSPKWFGEYAALLSKRFSDRVDNWITLNEPQMFTTLGHDMGIHAPGLKLPPEDMVRIIQHVLSAHGMAVEQLKSNCVNGADALNIGWAPAVGGVEPADETDQRLVDAAREAQFSFVDEPHFGFGTALWNDPVFLGKYPDAYLKTHGQHLPEGWEEDLKHISAPLGFCGLNVYHSWARAVYDSHGEPEIRQTDDLGAGYPRTHFQWPVTPRALYWVPRFFHERYNIPVVITENGMSGHDWVQTDGKVHDAYRIDFTKRYLGSLKDASAAGADVLGYFHWSLMDNFEWAEGYRHRFGLVHVDFSDFKRTPKDSFHWYSGVIGNNGADL

SEQ ID NO: 333 - protein, 535 aa, Bacteroides xylanisolvens
MIICMNAAGEAGVGSVLVSFNEVDGIPATANKWLMTDILRGQWGFNGFVVTDYTGISEMIDHGIGDLQTVSARAINAGVDMDMVSEGFVGTLKKSVQEGKVSMETLNTACRRILEAKYKLGLFDNPYKYCDPKRPARDIFTKAHRDAARRIAAESFVLLKNDSPDGNPNGNPLLPFNPKGNIAVIGPLANSRSNMPGTWSVAAVLDRCPSLVEGLKEMTAGKANIMYAKGSNLISDASYEERATMFGRSLNRDNRTDQQLLDEALNVARRSDIIIAALGESSEMSGESSSRTDLNIPDVQQNLLKELLKTGKPVVLVLFTGRPLTLNWEQEHVPAILNVWFGGSEAAYAIGDALFGYVNPGGKLTMTFPKNVGQIPLYYAHKNTGRPLKDGKWFEKFRSNYLDVDNDPLYPFGYGLSYTTFSYSDIDLSHSSMDMNGSLTAAVEVTNTGTWPGSEVVQLYIRDVVGSSTRPVKELKGFQKIFLEPGEMKIVRFKIAPEMLRYYNYDLQLVAEPGDFEVMIGTNSRDVKTAKFTLN

SEQ ID NO: 334 - protein, 860 aa, Fusarium oxysporum
MANTGMDRSFLTASVEDLVDHMSLAEKVSLIAGEDWWRTVALPRLNIPSVKVTDGPNGARGQSFFKMTPAVVLPNATAMAATFSSTLPTEAARLLAAETKARSSVCLLAPTINICRSPLGGRSFESFGEDPTLSGIIAAEYIKGLQSHGISAAIKHFLANDQEHERMGQDSIIAPRALRQIYLRPFQIAQARAAPWSYMTSYNKLNGTHCAEHDWLLKDLLRGEWGFEGLVMSDWMGTYSVAEAINAGLDLEMPGKPRWRQLQLVRHSINAHKILPETLNERVVTLLRWVQKLSALNPDIVYGRDDSIEWTRKENQEEDAALVRRIASEGIVLLKNETSTLPIVRGKVAVIGPNAKNGVITGGGSARLRSAWRVTSWQGLVDNKPDDIELSYTLGCKGSKFLPVFGEEFTSMDGVTPGFDMLHYAIADGKQASQPAVSEVWNNSDIMLADFKHPDLGDDYFTEIQALFIAPITGDWQFEVSVTGQAWVYLDDELVADLSQEQKRTSSFFGNGGNGTIITVAVVKDKVYKFRLLHDSRKPPLAPGQDSQPLQLIGMKLGSFPVIDEDKAINEAVELAKASDVAVLVVGLDQDWESESYDRPNLSLPLRLNDLVRRVAVEAPDTKKVVILQTGSAVSMPWLENVDSVIWPWYGGNEAGNAIADVVYGKVNPSGRLPITLPKRELDIAANLNFKSARTKTYYEEGIWVGYRHFNARGIEPVYPFGHGLSYTSFEYSDLIVSPSTSASPDEWKISVSAKVTNTGSVPGAHSVHFYTTPPPATSNSLTHPEVTLQGFNKTAVLLPGGSETVTVEMDKYAISHWDELTSVWRAEPGEWHVQIGTNAQTMCAKERFTVPRDFKWTGV

SEQ ID NO: 335 - protein, 446 aa, Thermotoga maritima
MNVKKFPEGFLWGVATASYQIEGSPLADGAGMSIWHTFSHTPGNVKNGDTGDVACDHYNRWKEDIEIIEKLGVKAYRFSISWPRILPEGTGRVNQKGLDFYNRIIDTLLEKGITPFVTIYHWDLPFALQLKGGWANREIADWFAEYSRVLFENFGDRVKNWITLNEPWVVAIVGHLYGVHAPGMRDIYVAFRAVHNLLRAHARAVKVFRETVKDGKIGIVFNNGYFEPASEKEEDIRAVRFMHQFNNYPLFLNPIYRGDYPELVLEFAREYLPENYKDDMSEIQEKIDFVGLNYYSGHLVKFDPDAPAKVSFVERDLPKTAMGWEIVPEGIYWILKKVKEEYNPPEVYITENGAAFDDVVSEDGRVHDQNRIDYLKAHIGQAWKAIQEGVPLKGYFVWSLLDNFEWAEGYSKRFGIVYVDYSTQKRIVKDSGYWYSNVVKNNGLED

SEQ ID NO: 336 - protein, 498 aa, Neotermes koshunensis
MWVHTFFFVILLVVVSGARRDVASSDTVYTFPDEFKLGAATASYQIEGAWDENGKGPNIWDTLTHEHPDYVVDGATGDIADDSYHLYKEDVKILKELGAQVYRFSISWARVLPEGHDNIVNQDGIDYYNNLINELLANGIEPMVTMYHWDLPQALQDLGGWPNLVLAKYSENYARVLFKNFGDRVKLWLTFNEPLTFMDGYASEIGMAPSINTPGIGDYLAAHTVIHAHARIYHLYDQEFRAEQGGKVGISLNINWCEPATNSAEDRASCENYQQFNLGLYAHPIFTEEGDYPAVLKDRVSRNSADEGYTDSRLPQFTAEEVEYIRGTHDFLGINFYTALLGKSGVEGYEPSRYRDSGVILTQDAAWPISASSWLKVVPWGFRKELNWIKNEYNNPPVFITENGFSDYGGLNDTGRVHYYTEHLKEMLKAIHEDGVNVIGYTAWSLMDNFEWLRGYSEKFGIYAVDFEDPARPRIPKESAKVLAEIMNTRKIPERFRD

SEQ ID NO: 337 - protein, 489 aa, Thanatephorus cucumeris
MFLALTWPQAFDEWTLSEAIAANASSGGLQKVLEEHYSTFITEEDFAQIAAAGLNWVRVPLPFWAVSKLPEEPFLERVSWKYFLKAIEWCRKYGLRLQLDLHTIPGSQNGFDHSGKRENINFLRGNMGLANAQRALNVIRSITEFVSRDEYKDIVQMFGVMNEPASQRIGMDSLTSFYVEMHDMMRTLTGAGKGPWISLHDGFDFAAHTADTFMPGADRLAISAHLYFSFATPLNPAPLERQTRLPCTQWSNRFNSSLDRGIFVSAGEFSLGFNDCAYFLNGASAGYRYDGTLPSYTGPRIGSCAPWLDSSEWTDEVKENLKQLALSSMDSMQNWFFWTWRIGASSRTGQVNSPLWSYKLGLERGYMPTDPRTAAGSCGNSDPRTTTTFTPHTQNSITAAYRAAHPFPPTNIVDATGTLASYPETGAPVIMPSPEFKGFSVPTTQSGTWANDYAPVAGCTYPDPWNGVGVAVPACATGERKRFVKEPQA

SEQ ID NO: 338 - protein, 755 aa, Hungateiclostridium thermocellum
MAVDIKKIIKQMTLEEKAGLCSGLDFWHTKPVERLGIPSIMMTDGPHGLRKQREDAEIADINNSVPATCFPSAAGLACSWDRELVERVGAALGEECQAENVSILLGPGANIKRSPLCGRNFEYFSEDPYLSSELAASHIKGVQSQGVGACLKHFAANNQEHRRMTVDTIVDERTLREIYFASFENAVKKARPWVVMCAYNKLNGEYCSENRYLLTEVLKNEWMHDGFVVSDWGAVNDRVSGLDAGLDLEMPTSHGITDKKIVEAVKSGKLSENILNRAVERILKVIFMALENKKENAQYDKDAHHRLARQAAAESMVLLKNEDDVLPLKKSGTIALIGAFVKKPRYQGSGSSHITPTRLDDIYEEIKKAGGDKVNLVYSEGYRLENDGIDEELINEAKKAASSSDVAVVFAGLPDEYESEGFDRTHMSIPENQNRLIEAVAEVQSNIVVVLLNGSPVEMPWIDKVKSVLEAYLGGQALGGALADVLFGEVNPSGKLAETFPVKLSHNPSYLNFPGEDDRVEYKEGLFVGYRYYDTKGIEPLFPFGHGLSYTKFEYSDISVDKKDVSDNSIINVSVKVKNVGKMAGKEIVQLYVKDVKSSVRRPEKELKGFEKVFLNPGEEKTVTFTLDKRAFAYYNTQIKDWHVESGEFLILIGRSSRDIVLKESVRVNSTVKIRKRFTVNSAVEDVMSDSSAAAVLGPVLKEITDALQIDMDNAHDMMAANIKNMPLRSLVGYSQGRLSEEMLEELVDKINNVE

SEQ ID NO: 339 - protein, 731 aa, Koribacter versatilis
MKISRVFLATTLALSMFGSAQRPDPRAELMKKPWMDKNKSADERAELVLKEMTVDEKINLIHGQGMEEMAEFGIPMPNKALGNGGAGFVLGVERLGIPLIQMSDAAYGVRSSAKNGRYSTALPSNLGSAASWDPQAACEYGALIGRELRAQGYNMTLGGGVNITREPRNGRTFEYMGEDPILAGTLVGNRIKCEQAQHVIGDTKHYAVNDQESGRTEVDVVISKRAMRETDLLAFEIGIEIGQPGAVMCSYNLVNGTYACQNKYLLTDVLKKDWNFKGFVVSDWGATHSTIESSAAGLDNEQPFGIFYSDKFKAGLDSGKIPMSELDDHVRRILRTEFASGIVDNPVVKAVVDVEAGLETARKIEEGSIVLLKNGNNILPLDKDSIKSVAIIGEKADFGMISGGGSAQVDPPGPSHEWQAHVWFPTSPLKAVQAKLPNAKVDWRSGSDKSKAAALAKQSDIAIVFVHQWISEGMDLPDLTLPFGQDELIERVAAANPRTIVVLESGTAVTMPWLDKVSGVVEAWYGGSKGADAVANILFGDVNPSGKLPMTFPRSVEDVPHPKLAVPPPNPNPMETYMHPELAKATVTATYDEGVKVGYKWYDAEKKPVLFPFGFGLSYTTYQYSGLKVSSGKTTTVSFTVKNTGKRGGDEIAQVYASLPAEAQEPPKRLVGFTKVHLNAGESKEVSVTVPAKYLSVFDEASNGWKLVPGSYSFMVGGSSQDLPQKQSATF

SEQ ID NO: 340 - protein, 822 aa, Neosartorya fumigata
MSSCITTTIIPTEASTSPRLYRVVPRRYHAHPLSLLTIPVLLGPLTHAAAITAGSSSTESIQSRQAANGPGYWLESISHQGIAPLGPSGYRVFRNVKDFGAKGDGITDDTAAINEAISSGERCGQGCFSSTTTPAIVYFPAGTYVISKPIFDYYNTIITGNPNALPVIKACADFDGGYLIDGDPYFGPELNWPATTVFWRQVRNLVLDTTDVAARKQISGIHWPTAQATSLQNVIFQLSADEGTEHQGIFCESGSAGFAGDLVFNGGKIAAALGNQQFTMRNLTFNHAQTAISHFWNWGWTYQDITINDCEVGIDISTGGSEQQSVGSITVFDSSFANTPVAIKSAQSESSTPRTAGSIILENVAINNVATVVQGPSGTVLAGTTRSSVIPGWGQGNRYVPDGPTRFAGDITPVSRPAGLVVGDGKYYQRSKPQYEQLPVSAFSSVRDGGATGDGTTDDTAALQRVIDSAAASDRVVFLDAGVYKVTSTLRIPAGSRIVGEAFPVILSSGAFFNNQEEPQPVIQVGQAGQQGHVELSDFIISTQGPQAGATLIEWNLASPSDPSGMWEVHARVGGFAGSQQTTRECAKTPETVITEADEKCIVAYMLMHVTPSASNLYLENTWLWVSDHDIDVQTEADGGQITLYSGRGLNIESTEGNIWLSGTSVEHNVLYEYQFVSTQNVYMGQIQTETAYYQSNPNALIPFTPKAAIHDPDFASSCKSSSDGNCEVGWGLRVVDSHDLYVYGAGLYSFFNNYDAGCSTYGGEQNCQNSIFSIEGDSAITVYNLNTLGTRSMVDRDGQSLASFSDNISVFTNNIVLFRSQ

SEQ ID NO: 341 - protein, 450 aa, Amycolatopsis vancoresmycina
MTDADPRFPPGFRWGVATAAFQIEGAWNTDGKGPSTWDTRAHRPGGLAGGATGDVACDHYHRLAEDLDLMAGLGIGSYRFSVSWPRVQPLGRGRWNGGGLAFYDRLLDGLLARAIEPVLTVYHWDHPQPIEDAGGWACRDTAARFADYAEGLAVRFGDRVRHWLTLNEPLSVMHAEMSGARPEPARHHGLRVAHHLMLGHGLAVPRLRAHVPGAEIGISLNLAGTTPASGRMADVAAAARAEAYEDRLFLDPLLRGDYPHLDGRPVIEATAADRALIAAPLDFVGVNWYAPARVAASDAGVFGYTRVPVPGAGTNLLGWPVAPAELGALLAWLRTHYPDLPPILITENGFPDTDEPDGTGAVPDPRRIAYLRACLEQVRAALDAGSDIRGYHVWSLLDNLEWEHGYRPRFGLVHVDFTTLARTPKASYRWYRELIAAQPLDGKDGGPCSG

SEQ ID NO: 342 - protein, 840 aa, Gibberella fujikuroi
MVLKRATHDDVSDSFDVEHVIQNTSVSDKISLLSGRDFWHTNPLPAFNVPSVRVSDGPNGVRGTKFVDGVPAACLPCGTGLAATWDQDLLYKAGTLIGNECIAKGAHCWLGPTVCIQRSPLGGRGFESMAEDPYATGKLAAAYIKGVQSTGVVSVIKHWLANDQEHERVGVNVVASERALREIHMLPFQIALSDAAPGGVMACYNKVNGKHVSENRDFLDSLLREEWQWKGLIMSDWFGTYSTTEAVNAGLDLEMPGPTRQRGQLLDLAVSTRKVSRSTIDTRARNVLEFVQRCANVPVAAKEGGRDLPEDRQLNRKLAGDSVVLLKNESGQLPLKRPFKSIALIGPNMKTTSFCGGGSAHLQPYYTVSPYDGIVAQLPPDVDVRYEVGASARGWYPLMQGGMITTPEGAPGMRMRFYSQSPSVPDREIIDESHLPDSSWLLMGYSHPKLDKLFYATVEGDLVIQESGPFEFGLAVYGTARLYVDGQLLIDNSLVQRSGTFFFGKGTIEEKAKMHLVQGQKYRITVQYESAPSSKLVKPGVVNFGGGAGRVGLASAIDPEVGIQKAVSAALQSDVTILCVGMTSDQESEGFDRPHMDLPGTLPRLASAVLAAAPDTIVVTQSGTPFSMLWAESAKTHVHAWLAGNETGNGIADVLFGTTCPSGKLPLSFPRRIQDTPTFLNFGSERGRVIYGEDIYVGYRYYEKVERDVLYPFGHGLSFTTFAYDKLNVTSAHVSFEITNSGSVPGSEVSQLYIAADEATSSIQRPKKELKGFKKTYLQPGETKKVEIPLDRFTTSFWDEELHCWLSEKGVYAVLVGSSSNKILLEGDLHVEATTRWTGL

SEQ ID NO: 343 - protein, 370 aa, Bifidobacterium longum
MRIPVPFFIFGDVPGHPGCVEYLDRAFDWAERAGLKVLIDLHTVPGSQNGFDNGGLTGVVRWHTTPRQVAFALDVLERLARRYRDRPALYGIEVLNEPVDRLTYLMSPSSSRAKDPGEARGSGHVPMRFLKRFYRAAYRWLRPVLGDGPVIVFHDGFRLNRWRGWFVREGMRGVIIDTHAYLVMSERPEVLFRILPDAWLMRWYRLFAAWGARRIRRAARFTPVMVGEWCVANGLAARMGECGAQGEVASVDASGGAFDGYGAFGDGGADVGDGASGDVGSRAGDAGDGVPSPAARRRAVYLRVAAMQLDAWNVSAGQVYWSYRLRGGRGEFDRLAPPAPGMGDGDAAVMDDTRLDPWDLRHVWHAGWMG

SEQ ID NO: 344 - protein, 451 aa, Unknown
  Uncultured bacterium
MTEYKFPKEFIWGTATAAAQVEGAALEDGRGLSIWDVFCHLPGVRLDTPDVACDQYHRYEEDIALMKSLGVQAYRFSFSWSRILPEGTGKVNQAGLDYYRRLIGCLKQNGIRPCATIYHWDLPYALQLRGGFGNREIVKWYLEYVNVLLKNFGNDIDLWITFNEPIAVYVGYALGFFAPGLKDEKYARQCIHNLLVCHGEAVKLFRSFHLPKAQIGITVDVWHHYPNRPDDPADIAMARRQNETQGYGMFLHPLFLGGYSDELTAYMKKWGFTPDIQSGDFDTIRQPLDFYGLNFYNAIFDQADDPHQMDVQPGGNFQTSVREGYYYEALQDVLRMLKDKYRLNIPIYITENGFPQTDEAPDEKGEIHDPARIDCVKNVLIQLHRAMENGADVRGYFLWSLLDNFEWTAGYSIRYGITRVDYDTQKRTVKDSGKWYSQVIRNNGFIEGGAI

SEQ ID NO: 345 - protein, 814 aa, Bacteroides xylanisolvens
MTLQEKIAQISHLQSWDVFDGQKLNTAKLAKMCGDKGYGFFEGFPLTAAQCRKNFRIIQTYLLEQTRLGIPGFSVAESLHGVVHEGSTIYPQNIAIGSTFNPELAYEMTKHIAGELNTIGVKQVLAPCIDVVRELRWGRVEESFSEDPFLCARMAVAEVKGYMDHGISPMAKHYGPHGNPLGGLNLASVECGIRDLFDVYLEPFEAILAETDILAVMSSYNAWNREPNSASKFMLTDILRDRFGFRGYVYSDWGVIDMLKNFHETAGNDFEAASQVLTAGLDVEASSLCFKSLESKVLAGEFDVRYIDRAVKRVLRAKFELGLFEDPYLEKNSYRWPLRAKECVSLSRQIADESTVLLKNEGNLLPLDIKKLRSVAVIGPNADCVQFGDYTWSKNKEDGITPLQGICRLAGKKVKVNYAQGCSIASFDQSGIEEAVCAAQQSDVALLFVGSSSTAFVRHSSAPSTSGEGIDLSGVELTGAQEELIEAVCATGKPVVLILVAGKPFAIPFAKKNVPAILVQWYAGEQAGNSIADILFGKVNPSGKISFSFPQSSGHLPAFYNHLTTDKGFYKEPGTYETPGRDYVFSSPNPLWAFGHGLSYTTFDLVSAIADKTHYQAHDTIAVKVKIANSGEVAGKEVVQLYIRDVVSTVMTPVKQLKAFEKISLNPAETKEITLKVPVHELYLTDNIGNRYLEPGTFEIKVGTASDRIVHRISIEVGSKLEKTPVVDSPQIIKVTPSGEFITVQGFVRDAQATPVAYVTVRAISSGQETQTDEKGFYSINLRTDDSIAFVKARFITQQMEVKGHKNINIRLVK

SEQ ID NO: 346 - protein, 849 aa, Fusarium oxysporum
MGDIESFNFPYGELLQHLTTSEKISLLSGSDFWHTQGIPRLSIPKLRMSDGPNGVRGTKFFNSVPAACLPCGTGLAATWSHDLMREAGDLIARGCHAKSTHVWLGPTTNIQRSPLGGRGFESFSEDPLLGGSLASTLISNVQKNGIACSLKHFVANDMEHERTLVDCRISPRAFREIYLLPFQIAIRDADPWALMTAYNKVNGQHMSEHQEILQEIVRNEWGYRGCIMSDWFGTYSTAAAINNGLDLEMPGPTEQRGKRVATALGVGKIKSSTIDERVASVLKLVERAGASGIPEGGPESCLDADQDRSVLRRLATESVVLLKNDDHVLPFRADKKAVIGPNAQKSFFCGGGSASLRPTRVVSILEGLRDQLEQPVEHAEACQIYNQLPVLGDIITAPDGTPGQFLMRIYTSPPTIQPNNSEITDTREAIDVLKLDDSNVVLYDYSNAAAPDNVVYATITADLVVENTDTYAFSLTVAGTATLYLDNALIVDNSHSQKRGTSFFGSGSVEQINHVQLVANRVYKLRVEFGSAATSDLNKAGAPVFGAGGVRIGCVRCSNESLELDRAVELAKTADQVVVCVGLGPEWESEGSDRSLYELPGRQSELISRVAAINKHVVVIIQSGTPVSGPWDQVAAVMQTWYGGNELGHGISDIVLGRESPSGKLPLSWPRCIEDNPSFLSYRSEAGACNYNEDIFVGYRFYDKTKRKVQWPFGFGLSYASFILQQPSVQLRGSGVDGNILVTLPVCNNSATTSGKEVIQVYVSRITPSSVSRPVKELKGFAKLFVAAGETRQAAIEIPLKNAVSVWDVTTNSWLLEEGIYKLSVGNSSDSSLLSTQFQVPITQHWRGL

SEQ ID NO: 347 - protein, 565 aa, Sorghum bicolor
MALLLASAINHTAHPAGLRSHPNNESFSRHHLCSSPQNISKRRSNLSFRPRAQTISSESAGIHRLSPWEIPRRDWFPPSFLFGAATSAYQIEGAWNEDGKGPSTWDHFCHNFPEWIVDRSNGDVAADSYHMYAEDVRLLKEMGMDAYRFSISWPRILPKGTLAGGINEKGVEYYNKLIDLLLENGIEPYITIFHWDTPQALVDAYGGFLDEEDYKDYTDFAKVCFEKFGKTVKNWLTFNEPETFCSVSYGTGVLAPGRCSPGVSCAVPTGNSLSEPYIVAHNLLRAHAETVDIYNKYHKGADGRIGLALNVFGRVPYTNTFLDQQAQERSMDKCLGWFLEPVVRGDYPFSMRVSARDRVPYFKEKEQEKLVGSYDMIGINYYTSTFSKHIDLSPNNSPVLNTDDAYASQETKGPDGNAIGPPTGNAWINMYPKGLHDILMTMKNKYGNPPMYITENGMGDIDKGDLPKPVALEDHTRLDYIQRHLSVLKQSIDLGADVRGYFAWSLLDNFEWSSGYTERFGIVYVDRENGCERTMKRSARWLQEFNGAAKKVENNKILTPAGQLN

SEQ ID NO: 348 - protein, 445 aa, Clostridium cellulovorans
MEKLRFPKDFIFGTATAAYQIEGAYKEDEKGESIWDRFSHIPGNVAKMHNGDIACDHYHRYKEDVQLLKSLGIKSYRFSIAWPRIFPKGFGEINQKGIQFYRDLIDELIKNDIEPAITIYHWDLPQKLQDIGGWANPQVADYYVDYANLLFREFGDRVKTWITHNEPWVASYLGYALGVHAPGIKDMKMALLAAHNILLSHFKAVKAYRELEQDGQIGITLNLSTCYSNSADEEDIAAAHRSDGWNNRWFLDAALKGTYPEDMIKIFSDTNIMPELPKELFTEVFETSDFLGINYYTRQVVKNNSEAFIGAESVAMDNPKTEMGWEIYPQGLYDLLTRIHRDYGNIDLYITENGAAFNDMVNRDGKVEDENRLDYLYTHFAAALSAIEAGVPLKGYYIWSFMDNFEWAEGYEKRFGIVHVNYKTQERTIKKSAYWYKELIERSNK

SEQ ID NO: 349 - protein, 788 aa, Dacryopinax primogenitus
MTISKEIDVEQTISSLSIRDKVKFLSAANFWHLAGHPDAGIGSVRVSDGPNGVRGIQFFNRTQASCFPCAAGLASSFDLDLIRSVGRALGDEARLQGAHILLGPPVNMHQNPLGGRSFECFSEDPVSSGLAGAAHVQGLQERGVAACLKHFVANEQEYERYSVDSVVPEHALREVYLEPFRLVMKHAPPKCLMTAHNRVNGTHASENANLLQDILRKEWNWDGLVLSDWTGVYSVVESVKAGLDVEFPGPGVMRGPPLNRSLQAGKLTSEDVDARVRNVLKLHNYAVRSGIPFDAPEESVDTPELRALLRKAASSSIVLLKNTKSVLPLAPKLGQKIAVIGPNAFTAQISGGGSAEVNASYRVSPLQGIWEAAEEAGAQVKYAMGAAAFRFVPNIDIYIVQSNTRQSSSFMLMDGIPLDLVGPIPYICVSATFTPTVSGPWLFGLTSVGEANLFLNGELLIDNNKAYVPGETFFGQGSMEKRNLVQHMEKGKQYEIKVRMHLSSQRAGHGPVAFTGTLKLGAIPSLEESTAIMEAVEVAKACDASLPGSINPLVSAVLAVNPNTVVVNQSGTPVSMPWLDQAPAVVQAFSGGNELGHGLADVLFGKVNPSGKLAVTFPKRLEDCNTYESFGITTPTPGKVYYTEGIYVGYKHVLCRDSVLFRVWAVLLLRWHFRPSANRVPSRFPLRVTNTGAVYGAEVVQVYVSELSPPLPEVPRELKGFTKIFLKPGESTSARVKLDREAFRYWDERHAEWRAEKGKYEILVRASTRDVRLRGTVELGNRLQWTGM

SEQ ID NO: 350 - protein, 818 aa, Rhizobium radiobacter
MIDDILDKMTLEEQVSLLSGADFWTTVAIERLGVPKIKVTDGPNGARGGGSLVGGVKSACFPVAIALGATWDPELIERAGVALGGQAKSKGASVLLAPTVNIHRSGLNGRNFECYSEDPALTAACAVAYINGVQSQGVAATIKHFVANESEIERQTMSSDVDERTLREIYLPPFEEAVKKAGVKAVMSSYNKLNGTYTSENPWLLTKVLREEWGFDGVVMSDWFGSHSTAETINAGLDLEMPGPWRDRGEKLVAAVREGKVKAETVRASARRILLLLERVGAFEKAPDLAEHALDLPEDRALIRQLGAEGAVLLKNDGVLPLAKSSFDQIAVIGPNAASARVMGGGSARIAAHYTVSPLEGIRAALSNANSLRHAVGCNNNRLIDVFSGEMTVEYFKGRGFESRPVHVETVEKGEFFWFDLPSGDLDLADFSARMTATFVPQETGEHIFGMTNAGLARLFVDGELVVDGYDGWTKGENFFGTANSEQRRAVTLGAARRYRVVVEYEAPKASLDGINICALRFGVEKPLGDAGIAEAVETARKSDIVLLLVGREGEWDTEGLDLPDMRLPGRQEELIEAVAETNPNVVVVLQTGGPIEMPWLGKVRAVLQMWYPGQELGNALADVLFGDVEPAGRLPQTFPKALTDNSAITDDPSIYPGQDGHVRYAEGIFVGYRHHDTREIEPLFPFGFGLGYTRFTWGAPQLSGTEMGADGLTVTVDVTNIGDRAGSDVVQLYVHSPNARVERPFKELRAFAKLKLAPGATGTAVLKIAPRDLAYFDVEAGRFRADAGKYELIVAASAIDIRASVSIHLPVDHVMEP

SEQ ID NO: 351 - protein, 462 aa, Phanerochaete chrysosporium
MSAAKLPKSFVWGYATAAYQIEGSPDKDGREPSIWDTFCKAPGKIADGSSGDVATDSYNRWREDVQLLKSYGVKAYRFSLSWSRIIPKGGRSDPVNGAGIKHYRTLIEELVKEGITPFVTLYHWDLPQALDDRYGGWLNKEEAIQDFTNYAKLCFESFGDLVQNWITFNEPWVISVMGYGNGIFAPGHVSNTEPWIVSHHIILAHAHAVKLYRDEFKEKQGGQIGITLDSHWLIPYDDTDASKEATLRAMEFKLGRFANPIYKGEYPPRIKKILGDRLPEFTPEEIELVKGSSDFFGLNTYTTHLVQDGGSDELAGFVKTGHTRADGTQLGTQSDMGWLQTYGPGFRWLLNYLWKAYDKPVYVTENGFPVKGENDLPVEQAVDDTDRQAYYRDYTEALLQAVTEDGADVRGYFGWSLLDNFEWAEGYKVRFGVTHVDYETQKRTPKKSAEFLSRWFKEHIEE

SEQ ID NO: 352 - protein, 480 aa, Enterobacter agglomerans
MKNGMLALGMTAADVPDNFLWGAASAAYQVEGATNKDGKGRSVWDYYLDEKHLAGPGISGALRLTFTDRDQYLKDIQLFKELGLNSYRFSHRLDTYYPDGQGPVNLRAVAHYRQFITDLEAAGIKPLVTLYHWDMPESLSAAGGWENRESVEWFQRYAEVIFANFSDQVDQFVLINEPTVEVATKIMAEKRLKGEELTLPPIVPAGSYLETSLKSYNHILLASAAAAESFKVKGYKGRLGIALPFFPVLTTENASDEDKADARLVDGILNRWFLDAMYKGNYPADVLKLAADRHLNIDVQPGDAERIHDAGLGFLGINYYAPFFIRHQKNASEVYSPEIIFPKNEKLAFNGAVRPDQFSALLERVRDEYGNPPVIITENGAGFEGEDQLTNGKVNDVNRCLYLVDHIHAMRESIARGANVQGYYVWSSHDNLEWLSGYKSRFGMIYVDYDTQKRTPKLSAEIYGKIIRGENISDVDCKSD

SEQ ID NO: 353 - protein, 449 aa, Candidatus microthrix
MKRSDFGDDFTWGVASAAFQIEGAPSADGKAPSIWDELTRTGKIAGEGGDQGIDFYNRYPEDIEMIKDLGFGANRISLSWPRLMGTGRERLNPKGADFYDRVIDATLEAGMEPWVTVHHWDIPLALWQEGGWTRRGIVEDFARFAEVCAERFGDRVKKWMVFNEPASVAGHLVLGLYGRKGLHPNTTLRSVHHINLACAEAGRRMRAALPEDAEIGTTNVMSVAYPYEPTDERTARRKRAIEALAIDMHLDPAGGLGYPFGANRLLNLMKRHIEDGDLESARFEYDFMGVQCYGPLVALRKLPVVGAVPTMTVPGAEARVSSAIGIPQDADALLWTFRKYANHPVAKRMVVTEGGFGGQDRLEPDGRVRDDIRIWVYRRNLEAVLAAKAEGINVDGYFAWSYADNVEWVLGRSPRFGIVYTDYDNDYRRIPKDSAKWFQRLLTTDAGVD

SEQ ID NO: 354 - protein, 870 aa, Chthonomonas calidirosea
MGKTKRSLKVNRRDFFTLGAATLLAAISLPDGDLLAFAQKEREKDLVYGIRRERFEWAQKKAAALVAQMTREEKISQVGNNVPAIPRLGLPAYNYYSGEALHGLVRGGPVTSFPLPLALANTWNPELQYQVYTAVSDEARAYHNRDGVGLAYYSPQTINTAKDPRWGRIEETLGEDPHLMSLMAVQAVRGMQGDDPNYLKTVACAKHYIANETDNDRTAVSETVDPRSFWEYYVRPFYACVVDGKVFSVMGAYNAVNGIPCCADKNLLTGILRERWGFQGYVTSDCDAIYNIYDPHHYATSLAEACAMGIKAGCDLDCGDTYPRHLGEAFEQHLLEEADLDKAVTRLLTARFLFGDLDPEPRCPYNKIPFSVVDSPKHRALALEAARQSIVLLKNDGILPLDKTALKSVAVIGPTAAIAHLGGYSGAPFLRVSPLSGIAQALGIGIHFDEVYAYQAVRLEGGPQLESSVEQGGTDIGFIKNGSWVEFPATDFAGKNEIEVRVASDTQGGTIEIHLDRLNGPLLCTLQVPHTGGWQNWISLKAPINGVIGKHKLFFLFKGGDGYLLNVAWYRLNPPSPPETHNPNGIALTYQQGCTITGARNDTMFQKAVEAARQADVAIVVAGVNQEVDAEGHDRDDIRLTGAQHELIQAVYQANPKTILVLSTNAPVAVTWEQENLPAIVAAIFAGQAQGTAIADVLFGNYNPSGKLATTWYKSVEDLPDFHDFDITKRTYMYFEGEPLYPFGYGLSYTTFQIGNIQVSHPRLTSGGSITVSVDVTNIGKRAGTEVVQLYVRPPKSPVKRPNKQLVDFKRVELRPGETKRVELSLPYESPALWYWDVAQSKFVLQPGTVTLMVGNSSAHIAHTTTIELV

SEQ ID NO: 355 - protein, 779 aa, Acholeplasma brassicae
MYDDKINSILEVLTLEEKVSLLIGEDHWRIKAIPKTDLKAVVFSDGPNGLRKEVSTKKQTFMAQSEKAVCYPSLALLGSSFNRDLIYQVGKMIAKEARDQSVDVLLAPGANLKRNPLCGRNFEYFSEDPYLSSECAINYINGVQSEDVMACLKHFILNNNENNRMVSNSIIDDRSLHEVYLNQFKRTITKAKPAALMTSYNKVNGSYVCETDLLKKEIREKLNYKGLVMTDWQAMNDRVASYKHGLDLEMPGGFKPTQIIKAVKNKTLDEKVIDEAVCRIIHTAIQADKNRKPSEFSVLEARKLAKIAAIESFVLLKNNGVLPFKTDKQIALIGKLAKKPRYQGAGSSRVNPREVVSLYDEFIRNGKRFEYAYGYEETTEAVDEALIEEAVTKSRNKSLVVVVLGLYEKEESEGFDRTHLNLPINQLKLMERLIVECKNIVCVIETGSSVLLPFEAGVDAIMLSYFSGEMGDAGLYDVLTGKFSPSGRLQETFLYDLNDLESTKYFNQGINSYYKEGIYVGYKDLLSLGKKSHYPFGFGCSYAKFGYQYVGVDKDIEKLTFRVLVTNTSNIDSKEVIQIYMGKKDSKIYRETYRLVGFNKQMVRQKTTVEFQIDVLLDDLMCYMTTTKQMCLEEGSYEFYIGTSSSNHFKEVSINLAGHSFDQNPNTYPIQMTTKEYLTYFSQPIVENNITSKYHANTTFEDISDRLLGKVLLSVAIKKIKKMSKDDLTVHMMTKAMKAMPLRSLESSTNGFFNQNRVSGLVLMLNRKRILGLIKIIKG

SEQ ID NO: 356 - protein, 470 aa, Chania multitudinisentens
MSAFPKDFLWGAATAAYQVEGAHDADGKGPSIWDTFSHLPGTTYQGTNGDVAVDHYHRFREDVALMAEMGMQSYRFSISWPRLLPQGRGTVNEAGVKFYSDLIDALLEHNIEPMITLYHWDLPQALQDEGGWEARSTAEAFEEYARLCYQRYGDRVKLWSTFNETVCFIGFGYITGGHPPGVKNPARALQACHHVFVAHAKAVAAFRTSGINGKIGFVNVLQTHTPLSQSAEDLAAYQLAEGIFTHWLYDPVLKGEYPAQLLAQAQAVWGVPQFAAGDEQLLRDNICDFIGLNYYKRETIAANHHESHLTMNTSGEKGKGHQQGNEFGFKDLFKFVRNPTGVYTDWDWEIYPQGLTEGIMNIKARYGDIPMYITENGLGAKDPIINGEVVDDDRIDYLRQHIGAIEDAIKQGADVRGYYPWSFIDLLSWLNGFQKQYGFVYVDHNKGLARQRKKSFFWYQKLIGSNGAER

SEQ ID NO: 357 - protein, 840 aa, Gibberella moniliformis
MAEANFVDVEALLSNLTLDEKVELLAGQGSFRMTGLEKHGIPALITSDGPHGIRGRRSFTRMPSPMLPSATGMGATFNTELIHKIGSLLGEEAKVRGVHVLLAPTLCLQRSPLIGRGFEAFGEDPFLSGTLGAHYINGVQEQGVATSVKHYAAHDQSDNSIEDNVVMTERTLREVHMLPFQLALRGSDPWTIMTSYNKINGIHVSEDPLLMKEILREEWGFKGLVMSDWFGTYSTSEAINAGLDLEMPGPTDWRGKRLSIAVNSRKVSKATVDTAVENVLNLVNKCKAGEKSGKPPQSDTPEQRALIRQLVAESVVLLKNDKQRLPIGNPKNLKFGLIGDHVKNPALCGGGSAEVEPYYGITPYEAIKEVVGEENITYTPGCNSFRFSPLIKGHTPPDSDTEGWSVEIFGEDPQESPNAKVLVSTTAEKQLVDVPESYHASLPTKFYARAKAKYTIHESGKLKFGFSTSGKGKLLIDGKEAIDLWTSQPPKTDSTPCFNRLSMERFYEGEFEKGQVLDLEVLQVNESLSGGVGTAQTLAGRVGIFELYNEDQGIKDAVDLAKKVDVPIVITGLSSDFEYEGSDRKHLRLPGRVDELISAVLEANPDSIIITQSGLPIEMPWESQAATLLHAWFGGQETGHGMADVLFGKVNPSGRLSLTFPKSVKHTPAYLTFSKADYDIVYGEGVFIGHRYYEMVDREPLFYFGHGLSYSKFEYSNLNVPNEFTPAADHQMRVTVDITNKGAFAGAEVVQLYIHHADSSLQRPVRELKAFTKVNVDVNETKTAELTLDKYSLSFWDQEASKWKAEAGKYTVILASSSNPKDEIARADFTLPKTFFWKGL

SEQ ID NO: 358 - protein, 868 aa, Fusarium oxysporum
MTLVKAQPPLNNGHVKNEAKEWAQDKLSQMTLEEKVLLLTGEDLWRTNAIPRLGISRIKTSDGPVGVRGGIFTDGVSAASAPTGVSLAATWDLSVIRDVCSVLIHEAKSKEVDVLLGPTVCIPRTPLGGRNFEAYSEDPYLTGKIASEFINRLQDAGIGACIKHLAANDQETRRFFIDEKIPDRALREIALQPFQIAIRDSNPWTVMTAYNKINGTFCSAHDFLIQDVLRKEWGWDGLVMSDWFGTNSVVPSVKAGLDLEMPGPVRRRGKHLIDAYQKGLVDLSFIDASASRVLELVHKVGKSNIPDWKEGQEKADDLPEHRAIFRRAGAEGIVLLKNSAKLLPLSNLDGRRIAILGPNALRSVATGGGSSNLAPHYRTTPYQSIKSEIAAKFPTAKVHAHAGILTHRYIPLVDQDVMTNPETGKPGFQLCLYRNMNHGGQPFMVEHRPSSNLVCYDGLPPELTTGETYSYRGRTVLKPKTTGLHEFSLSSCGPGKLMLDGEVIIDIERHWWSPKSSLFMSYGSPEERVKVYMEAGREYELLLESISREPKPYDLDYMAELEREEVQDGGRIGFMENPGDLDRFFQDGIGMARDSDVAIVVVGKDHEWETETSDMVSMDLPGRSNEFISAVAAANPNTIVVNQTGSPITMPWKDKVSAIVQAWYQGQEQGNCLADVLLGTVNPSGKLPITFPKRIEDTPPYDNYPGENDVVYYGEGIYAGYRFYDHRKIEPLFPFGAGLSYATFEYSNMRISSNEFHEEAGIEVEVDVTNIGPRDGKEIVQFYVGQINPRLHRPVRELKGWEKVFVPVGQTVTARMKIDKVSLSYWDDSVAKWVIEKDAEYRVTAAKDSSDEGLTAAFRSPKEYQWVN

SEQ ID NO: 359 - protein, 462 aa, Phanerochaete chrysosporium; identical to SEQ ID NO: 351

SEQ ID NO: 360 - protein, 568 aa, Secale cereale [sequence omitted]

SEQ ID NO: 361 - protein, 453 aa, Anoxybacillus gonensis
MFQFPKDFIWGAATSSYQIEGTATGEDKIYSIWDHFSRIPGKVANGDNGDIAIDHYNRYVEDVALMKALHLKAYRFSTSWARLYCETPGKFNEKGLDFYKRLVHELLENNIEPMLTIYHWDMPQALQEKGGWENRDIVHYFQEYAAFLYENLGDVVKKWITHNEPWVVTYLGYGNGEHAPGIQNFTSFLKAAHHVLLSHGEAVKAFREIGPKDGEIGITLNLTPGYAVDPKDEKAVDAARKWDGFMNRWFLDPVFKGQYPADMLEVYKDYLPDVYQDRDLQTIQQPIDFFGFNYYSTATLKDWKKGEYEPIVFDHVSTGRPVTDMNWEVNPNGLFDLLVRLKKDYGDIPLYITENGAAYKDRVNEDGKIEDDERVTYIREHLIACHRAIEQGVNLKGYYVWSLFDNFEWAFGYDKRFGIVYVDYETLERIPKKSALWYKETIINNGLQVDNDK

SEQ ID NO: 362 - protein, 446 aa, Thermotoga maritima; identical to SEQ ID NO: 335

SEQ ID NO: 363 - protein, 716 aa, Rhodospirillum rubrum
MNRIDTLLAAMTLEEKIGQLTMATAGYAITGPVLGGDVTDGIKAGTIGSLLNVWGAEASRTIQALAVENSRLKVPLFFGFDVVHGHRTVFPIPLAEAAAFDPVLWEETARASAEEAAADGLHMTFAPMIDIARDPRWGRIAEGPGEDPWVGARMAEAKVRGFQGADLADTTRVCATAKHFCGYGAAIAGRDYASAEISLQTLHEVYLPPFAAAVKAGVGAVMPAFHDIGGVPLTAHIPLLRDWLRGEVGFEGVLVSDYNAIAELIKHGVAGTLAEAAALALNAGVDIDMMATAYSRGLPEALERGLTDMAHIDASVRRVLGLKERLGLFDDPYARCAPRVDAEGDRARRLLARKAASRSVVLLSNPAKILPLPSRLHRLAVVGPLADSRADMRGPWSAAGLPDDPVSVVEGLRDLLPADSIAFAPGIDLMGKDLSGEEAALDLCRAAEAVVLCLGEAATMSGEANCRADPGLPGQQRAFAEKVFDLGVPVIVVLFSGRPLILPWLIERADAVLAAWFPGCEAGPAIAEVLLGLSDPGGRLPVSWPRHVGQVPLFFGARSGGRPENPEDHYTSKYMDMPNTPQFPFGHGLSYGDFALEALTVGPDEVSADGVIEVTVSLINKGGRPGLGCVFLFIHDPVASVARPLLELKGVLRAEVEAGGRCELRWSLPVADLAFLGADLTPRIEAGVIEIAVGRSADPEGLLRRSVRILTPRHQG

SEQ ID NO: 364 - protein, 720 aa, Thermotoga neapolitana
MEKVNEILSQLTLEEKSETCSGGWTSGVVWKSHSGWRCRGETHPVPRVGLPAFVLADGPAGLRINPTRENDENTYYTTAFPVEIMLASTWNRELLEEVGKAMGEEVREYGVDVLLGPAMNIHRNPLCGRNFEYYSEDPVLSGEMASSFVKGVQSQGVGACIKHFVANNQETNRMVVDTIVIERALREIYLRGFEIAVKKSKPWSVMSAYNKLNGKYCSQNEWLLKKVLREEWGFEGFVMSDWYAGDNPVEQLKAGNDLIMPGKAYQVNTERRDEIEEIMEALKEGKLSEEVLDECVRNILKVLVNAPSFKNYRYSNKPDLEKHAKVAYEAGAEGVVLLKNEEALPLSENSKIALFGTGQIETIKGGTGSGDTHPRYAISILEGIKERGLNFDEELAKIYEDYIKKMRETEEYKPRRDSWGTIIKPKLSENFLSEKEVHKLAKKNDVAVIVISRISGEGYDRKPVKGDFYLSDDETDLIKTVSREFHEQGKKVIVLLNIGSPVEVVSWRDLVDGILLVWQAGQETGRIVADVLTGRINPSGKLPTTFPRDYSDVPSWTFPGEPKDNPQKVVYEEDIYVGYRYYDTFGVEPAYEFGYGLSYTTFEYSDLNVSFDGETLRVQYRIENTGGRAGKEVSQVYIKAPKGKIDKPFQELKAFHKTRLLNPGESEEVVLEIPVRDLASFNGEEWVVEAGEYEVRVGASSRNIKLKGTFSVGEERRFKP

SEQ ID NO: 365 - protein, 857 aa, Candidatus microthrix
MEDDGANSKTELSDQRKVALLSGADDWHTEAVPELGLEAVMMADGPHGLRKVMSASLADLQASEPATCFPTGSALAATWDRVLAGDVGRAIGREAVAEGVGVVLGPAVNLKRHPAAGRNFEYFSEDPFLAGELAVAWIDGVQGEGVGASLKHFAVNNQEANRMVVDAVVDPATLRELYLGAFEAAVRRSRPWTVMSAYNLLNGVYCSEDPWLLSELLRDQWGFDGLVVTDWGANDDRVAGIRAGQDLEMPGGHGTHDAAVLAALADGSLHRADLDGCVRRVLALLERADGARSGRPGSAMASPRPGADPDALHREHHQLARRAAAAGTVLLTNDGTLPLAPSGHVALIGEFAAHPRFQGGGSSQVKATRSDNLHAELRTHVDAAGGRVQYAPGYVLRARDDRPGEPARRVDEAVSIARGAEVAVVVVGLPDAVESEGFDRDHLHLPESHNILVRAVCAANPNTVVIVVAGSPVTMDWVDQPAAIIHGYLGGQAAGGALADVLVGAAEPGGRLAETFPVRSAGVASDRWFPGEPHQVTYREGPYIGYRWFDASGATPLFPFGHGLSYAEITLGVPTLSAQHVDAGVLLGGTDVVAPAEVPPPGAGPVAFTVTVPLTNAGDRAGSEVVQVYLESPDTGRPAAHRHLVGFAKVNLEPNSTREATVDVHARALCHWHPADRGWAVSAGTWGVAVGCSSGNLPHGLMVEVASSWSAPEPDPALDPYRNPRPDDWDPGVAAFEALLGRSVPEPTPVRPFTRNTTLGELGETRLGRPLLALVRAIVAHTTGGAHDEGGLGAMIDRSLGELPLRNLAVMSQGRVPMSAINRLIALANRMPGHPAGHPPGRPPGRSVGFTRPGRRR

SEQ ID NO: 366 - protein, 789 aa, Ruminiclostridium cellobioparum
MGNFREEMYAEKYKDNLLSPEERSEDLLSKMTLREKVGQLNQRLYGFDCYNRIDDEVELSAEFKEEVKYWNGLGVLYGLYRADPWSKRDFNTGLEGSLAIKAYNLAQKYVVRHSRFGIPMLMSSECPHGHQALDGYLLPVNLAMGAAWNPELMASAYGVCARQMKDLGVNLALVSMLDVLRDPRWGRSEECFSEDPYLCSVLAEAAVKGCQERGVPVVAKHFCAQGEGTGGINASAARIGERELREIHLPPAAAVCKAGVKGIMAAYNEIDGIPCHGNSRLLQDILRREMNFSGVVMADGTAVDRLDILTGDNMRSGALALSSGVDISLWDKGFTGLEEAVKKGLVSEKLIDRAVLKVLELKFQLGLFERPYLEEATEKEAPLVEEEKHSCPSRQPYRYSYEQHPQSLELARQSAVLLKNEGILPLDLKKVKSIAVIGPNADNIYNQLGDYTPPLRKGEGITLLKGLENLCSDTKIRYTPGCSIGGKDETGIKTAVELVSSSDIVILALGGSSSRFAGASFDINGAAVTPQPDVESARNFQMDCGEGVDCAGLTLPGVQQELARAVFDTGKPVITVLIQGRPYAVEEAAARSRALIAAFYPGPMGGQALAEILLGKVCPSGCLPVSIPRSAGQLPVYYNHKVSYDAMRYSDMANTPLFPFGFGLSYTGFKAENFKLTTENISLEKLEKGEKFELAFTVRNAGNLEGHAVLQLFVQDLQASTVRRIRELKGFTKVRLAAGEEKACRLELEYEHLAVWDSGMRYCVEPGEFLLELRESGRKVWSGLVVCNT

SEQ ID NO: 367 - protein, 707 aa, Acholeplasma brassicae
MKDLVSTLTLEEKIGQLIQIAPFFYIEKIDKNVFGPLLDLGISEEEIFLTGSVLGIKDAEEMIEVQKTYLEKSRHKIPLMFMADIIHGYKTIFPVPLAMAAAFNPNLVKKAARISSIEAQTAGIHVTFSPMADLTRDPRWGRVVEGFGEDPYLNGVLAASMVQGYQHDGIDKEGNLASCVKHFAGYGLSEAGRDYNTTDVSRLNLHQYYLTGYKKALDAGARLVMTAFNLIEGVPATTNAYLLREVLRDQYQFDGVVISDYDSLKETIEHGTSKDEKDAARQGIIAGLDIEMATAAYFRNLPALIQENKVDIALIDEAVLRVLELKRDLGLFDNPYKGASVTKAKQLVLSEAHKKASLEVALESAVLLKNDGGTLPLKKEMRVALLGNYATSKDTIGPWSWHGNPSDNNSLDDVLNGYAASLYVNDTLEAHLLDETSINDSDILVVAIGESRRESGEAHSKTNIKLSNQQERFINDLKQFNKKIVLVLFNGRPLDLSGVIDQSNAILETFFLGTCSSEAIAMLLYNEKNPSGKLPMSFPRNVGQVPIYYNYLNTGRPYKNDGNEYTSFYLDEKNDPLFSFGYGLSYSQFEFSNLIVKNAVFYKGETFQFSIDVTNTSAFDGYEVVQVYLRDLVAEVSRPVKELKAFNKVFVKKNETVTLEFLLDDEAFSYVHRDLSFESDAGDFILYVGNSSTSTLETKITMKEGKL

SEQ ID NO: 368 - protein, 475 aa, Klebsiella pneumoniae
MTTVRMTIPDDFILGAVASAWQTEGWSGKKPGQDSWPDLWYKNDRHVWHNGYGPAVATDFINRFQEDVQLMKLAGLTHYRTSINWSRFLTDYENVTVDEEYAAYYDQLFDALLANGITPMICLEHYELPGYLLEKYGGWGSKTVVELFVRYAEKVFARYHPKVTRWFTFNEPIVVQTRVYLDALRWPYEQNTSTWMQWNYHKVLATASVVKRFRELGYPGTVGCILNPEVTYPRSRAPHDLRAAEIYDLFYNRMFLDPLVHGVWPPELLALLEQHQVTWETSEEDLAVIREHTVDELGINLYYPHRVKAPSRAWHPHTPFHPAWYYEPFELPGRRMNASRGWEIYPQIIFDMAMRIKNDYRNIPWFVAESGMGVENEGQFRNREGVIDDSYRIRFISEHLWHTLRAREAGANCQGYMLWAFTDNVSPMNAFKNRYGLIEIDLQNHRARRPKASAHWFRQLGERRELVLDIDDEYR

SEQ ID NO: 369 - protein, 791 aa, Unknown
  Enterobacter sp.
MTAIYKDAGRPVHERVADLLARMTPEEKFAQMHAYWLILDENGNHRERSDLSDEFAGVSEQAALSERLKLGVGQITRPLGTHIVDAKTGVRAANRLQRMMMEETRLGIPALFHEECLVGLLCKDATLFPSSLNYGSTWDPELVQRAAEQIGKEARSVGCQQGLAPVLDVSRDVRWGRTEETFGEDPWLVGVMVTAYVKGLQGDKRDLLATLKHYVGHSFSEGARNHAPVHLGFSELNDTFLLPFEMAVKLANAGSVMPAYHDIDNQPGHSDSFLLTTVLREQWGFDGIIVADYGGVSLLHQHHGISHDAAESAALAFNAGLDVELPKDDCARHLADAVERGLISMTKVDEIVARVLTEKFRLGLFEKPYADENGIDLQNDLTRQAAREVATKSVTLLENNGILPLGGKPRVAVVGPTADDPLALLSGYSFPVHLIISDMVEETLQVTTPRAALEQYLGASNVRYAKGCHIIEKRMAGAPVFPGDSGSKPMQQSPVSQSTALIPEAVNAAQESDVVVACVGDLAGLFQSGTVGEGSDTDSLNLPGVQQQLLEALVATGKPVIVVMTGGRPYNLQGLEDNVAALLMAWAPGQEGGWAIADVLTGRAEPQGRLVVSVPKSAGAMPYYYNHKLKSGGTPFAFHFGSRYPFGFGLGWTTFSWGAARVAESSVPVDGEVTLSVDITNTGERSGSEVVQVYVRDKVATQVRSLQELKAFQRVTLSPGETATLSFTLPVEMFNFTRRDGKRIVEPGEFELQVGASSADIRERVTVRVTGETRVLPAEWRMLSTCKVTRA

SEQ ID NO: 370 - protein, 862 aa, Rhizoctonia solani
MAPRPFKPLDVEDVISKLSLNEKTRLLAGIDNWHTYPVPRLGVPSLRFTDGPNGARGTKFFEGVPAACFPAATGLGSSWDPEFIQKVGQAIGRDCKDKGCHVLLGPTINIQRSPLGGRGFESYSEDPLLSGTLARAFIKGVQSEGVSATIKHYVTNDSEFERMSMSSELSTRALREIYLRPFELACRDPETAPWAVMTAYNRVNGLHASENKYLLDSVLRKQWGWEGMIMSDWYGTYSADASIKAGLDLEMPGPPTWRADALQRCVVAQKIRVPEIDARVREVLKLINRVAVSGIPENADETGEPKPETIDLLRQAAAHANVLLKNSESLLPISAKDVASIAVIGPNADSPVFSGGGSANLRPYKHTTALEGIAAALQDAGNKVEVQHTIGAHAHKEAPLLGVKHLKTKAGEPGYDIEWFNEDPVQNPDAKRVHYTHGTTSFAFFNDNLPGDDVLHQECWATMTAIFTPEVTGKYEFGAAATGLVDVYVDGKKIIDNSSNPVPGHVFFMTGTVEVLNTVELTAGKPAEIKLQFASPVAARTKGFTQIGAGSLSLEGRGGCRWGGGRTFEDDQGIKEAVDLAKKVDKVVLVVGLNNDWESEGYDRDNMELPRATNRLVSAVLEVNKNTAVVIISGTPVAMPWAESASTIVQSFYSGGEAGNGLADVLFGKVNPSSRLPLTFPVRDEDTPSHLNFPGQNGKVLYAEGVFVGYRHYLTYKKKVLFPFGYGLSYTQFEHSDLKLSGEIGKDSTVKVSVTVKNTGKVAGRDVVQIYVRDLVSRLDRPVKELKGFAKSSLLEPGKSETVTITLDKYAFGYFDDWAGEGRDGEGLWVAEAGDFEIVAASTSEDVGISAGISLKQSFEWL

SEQ ID NO: 371 - protein, 469 aa, Homo sapiens
MAFPAGFGWAAATAAYQVEGGWDADGKGPCVWDTFTHQGGERVFKNQTGDVACGSYTLWEEDLKCIKQLGLTHYRFSLSWSRLLPDGTTGFINQKGIDYYNKIIDDLLKNGVTPIVTLYHFDLPQTLEDQGGWLSEAIIESFDKYAQFCFSTFGDRVKQWITINEANVLSVMSYDLGMFPPGIPHFGTGGYQAAHNLIKAHARSWHSYDSLFRKKQKGMVSLSLFAVWLEPADPNSVSDQEAAKRAITFHLDLFAKPIFIDGDYPEVVKSQIASMSQKQGYPSSRLPEFTEEEKKMIKGTADFFAVQYYTTRLIKYQENKKGELGILQDAEIEFFPDPSWKNVDWIYVVPWGVCKLLKYIKDTYNNPVIYITENGFPQSDPAPLDDTQRWEYFRQTFQELFKAIQLDKVNLQVYCAWSLLDNFEWNQGYSSRFGLFHVDFEDPARPRVPYTSAKEYAKIIRNNGLEAHL

SEQ ID NO: 372 - protein, 485 aa, Unknown
  uncultured bacterium
MPAGLLISSAGLGSPPSAKQPCCRPGTSIKKGHQMTEHELQPFPKGFLWGAATSSYQIEGAWNEDGKGESIWDRFTRIPGKIKNGDSGDVACDHYHRYEQDLDLMRQLGLKTYRFSIAWARIQPDSSRQINQRGLDFYRRLVEGLHKRDILPMATLYHWDLPQWVEDEGGWLSRESASRFAEYTHALVAALGDQIPLWVTHNEPMVTVWAGYHMGLFAPGLKDPTLGGRVAHHLLLSHGQALQAFRALSPAGSQMGITLNFNTIYPVSAEPADVEAARRMHSFQNELFLEPLIRGQYNQATLMAYPNLPEFIAPEDMQTISAPIDFLGVNYYNPMRVKSSPQPPGIEVVQVESPVTAMGWEIAPEGLYDLLMGITRTYGKLPIYITENGAAFDDQPDQSGQVNDPQRVGYFQGHIGAARRALADGVDLRGYYAWSLLDNFEWAEGYSKRFGIIYVDFETQQRTLKQSAQWYRDVIARNGLAAPAI

SEQ ID NO: 373 - protein, 787 aa, Thermoanaerobacter thermohydrosulfuricus
MMKASYLDPKQPVEKKVENLLAQMTIEEKIAQLSGIWVYEILDDMMKFSYEKANRLMTHGIGQITRLGGASNLSPQETVKIANQIQKYLVENTRLGIPALIHEESCSGYMAKGATIFPQTIGVASIWNPKLVEKMASVIREQMKAVGARQALAPLLDVTRDPRWGRTEETFGEDPYLVMHMGVSYIRGLQTENLKEGVIATGKHFVGYGNSEGGMNWAPAHIPMRELYEIFLYPFEAAVKEANLGSVMPGYHELDGIPCHKSKQLLTDILRKDWGFDGIVVSDYFAINQLYEYHRLASNKKEAAKLALEAGVDVELPSTDCYGLPIKELIEQGDIDIDFVNDAVRRILKAKFLLGLFENPYVDEKRVVEIFDTQEQRQLAYKIAQESIVLLKNESNLLPLKKDLQSIAVIGPNADNIRNMIGDYAYPCHIESLLEMREKDNVFNTPLPEGLEAKDIYVPIVSVLQGIKEKVSPKTKVIYAKGCDVISDDTAGFNKAIEIAKQADVAIVVVGDRAGLTDGCTSGESRDRADLNLPGVQEQLVKAIYETGTPVVVVLINGRPMSISWLAEKIPAIIEAWLPGEEGGRAIADVIFGDYNPGGKLPISIPCSVGQLPVYYYHKPSGGRTNWKGDYVESSTKPLYPFGYGLSYTEFLYSNLSISHPKVSTQGGIIEISADVKNIGKVKGDEVVQLYIHREFLSVTRPVKELKGFKRITLGVGEQKTVIFQLSSEQLGFYNEEMEYVVEPGRVEVMIGSSSEDIRLFGSFEIVGEVKKTDKKFMTQVRVENKL

SEQ ID NO: 374 - protein, 470 aa, Stigmatella aurantiaca
MSRHRLLLALPLLVAACSESSRFEPDAARTALIGTGLPAGFLLGTSTSSHQVEGGNTNDWTRWEQERFPDGRPHIKDERPSGEATDSWNRFGEDVRAMQVLGANAYRFGLEWSRLEPTPGAWNAEAAERYRQWARSLRQQGITPLVTLYHFTLPLWVSDAGGWENPATLEAFEAYAARVAEALGGEVDWWCTVNEPNVYAIQGYLDGIWPPGKKDTRAMAAVLDRLIEAHARAARQLRALDTVDADGDGHATRIGLAHHARIFQAATGSMADVAATALTDAFVNESVPEALRTGRIRLSVPGSTSIDREVEGLKGSIDYFGLNYYTRDYIRQDLGEASLARQYTPRGKTVNDLGWELYPEGLYLFLQRYGTLGVPILVTENGMADRSGERRPRYLQTHLYAVEQAIAEGVDVRGYFHWSLIDNFEWAEGYEPKFGLFAVDVNSPEKSRTETPSVRTFQDIARNLGLTPSP

SEQ ID NO: 375 - protein, 731 aa, Burkholderia thailandensis
MHAKRLSAALLSASLCVFSHAAENGAPSKDFAFQDDSALRRADMLVRQMTLDEKLQLIHSKYQMSDVPGGGAGFIQGIPRLRIPDLNMVDSATGSGSTSQPSTTFPATIGLAASWDKRLSYAFGAVIADQLRAQGFAMGLGGGTNLAREPRGGRLFEYLGEDPVLAGEMLAARTRGTQDRKVIATIKHYVGNEQETNRMGGNDQIDERTLRELYLLPFEIAMQTARPGNVMCSYNRVNGDYACENTHVLTDVLKNEWRFQGQVQSDWGAAHSTAKAINAGLDEEEDVGPTVFLTPDLVKQALANREITPARLDDMARRKLYAMIRTGVMDDPPRGGGTIDFAAANRFAQYAAEQSIVLLKNQDRQLPLDSASLRRIAVIGGHADAAVLTGGGSGNTRHPVTGAFAGCGGLTFPTTTGCNWWPNPWLKLDVPIVQAIRNLAPGAAVAFAGNSDQQSPFAAYTQQQIDAAVDLARRSDVAIVFVTQAAGEDFGELRSLALANPTNQDALVQAVAQANPRVIVVVESGNPVLMPWRDQVSAIVQAWFPGEGGGNAIANVLFGKVNPSGKLPVTFPARDEDTPTWGADGTLSPNPVYSEKLKIGYRWYDANRIAPMFPFGHGLSYTHFSYSRLEVKQRADATTTVSFTLTNDGPVAGAEVPQVYLGDLDDPQEPPKRLVGWDKVGLRAGEARRVRIVIPAEMRRVWDTHRNGWTLAKGGRIYVGASSRDIRLQQP

SEQ ID NO: 376 - protein, 727 aa, Yersinia pseudotuberculosis
MSTVYRDATLPIEARIDDLLSQMTLAEKVGQLCQQPMLDYQQHRDDYLAGVRAGRWGSRILADTAWAGNAPGENVDPCQLNEIQRAAVEHSRLGIPLLFARDVIYGQATVLPIPLAQAASWNPELVQQAYRVIAREAASLGIHWTFAPMLDIARDPRWGRTIETSGEDPWLTAQFAAAVVKGFQGDDLSAADSLMACAKHFVGYAAVEGGRDYDTTELSDNTLHNVHLPPFQAAIEAGVGSVMTGFCDLGGTPVTAHGELIRGWLKQQQNFDGLVISDWGSIADLTHFGIAQDALRAAELALQAGVDMAMTHEAYEDKLDQLVLQGRIKEALLDDAVRRVLRAKFRCGLFERPYVDEEWHKRELRRPEHLALAQRLAEQSIVLLKNRQALLPISRTSVPLTLAVIGPHAHSQRQHLGSWCLDGDADQVMSIYQSLCAIAGEVKVITEQSCFSDEMIECAHRADIVILCTGESHRRTGEARNIAELQLPPGQEELIAAVGRTGKPLVVIQCTGRPLPSPATEQYADALLYGWQCGSEAGKAIARIIFGEQVPCGKLPMTVPRSTGQIPIYYGRKPLGKMRDYREYQPYKDLADTPLYPFGFGLSYTRFTYSDLQLSHESLELGASLRVTMTVTNDGAVAGDEVVQCYIRQYVASTTRPQRELKGFQRISLQPGESGEVSFTLGVRELAFYGQHRRYAQEPSRISVFVGGDSTTPHQADFTLFENLYTV

SEQ ID NO: 377 - protein, 701 aa, Togninia minima
MGVAATIKHFVANEQETARMSVDETISERALREIYLRPFEIAVKEAKPWALMTAYNKVNGTHCDSHEWLLAEVLRGEWGWKGLVMSDWGGTNSLAGGLKAGLDLEMPGPPRVRKVDAVLEAIKAGEVSESVIDDRARGVLEFLEKLNAFGKTASTTERAIDKPEHRKLIRDAGSRGIVLLKNEGAILPLTKDKVNGKKIALVGLAKDALAHGGGSAGVNAHYKVTPWDALNSALGDSVEFTYAKGVDKARLLPPISKDGTSGSVIGLDGENGFTRILYDVNSPDTPDSTLHGFALSAYSPLGSQESLWKILEIVGDFTPAETGNHYIACSGIGSTQVFINDDKIFEQEGNCTDPMGALFGAMTEEEFTYAFTAGTTYRIRIRTIPPTNVGSKILEGRSGVRMGFSLASIHDADLEGEAVRVAKDADLAIVFTGHDPQWETEGRDQDSFHLPRQGSQDSLITAVAKANRNTIVVNSTGVAVAMPWLEEVPALLQTWFPGQECGNAIADVLTGALNPEGHLPVTFPKRLEDAPAYGNFPGDYVQGQLKVQYAEGVFIGYRHYDRLTRDKVNFPFGYGLSYTDFEVEGAKITEHSKDGYTVAATIQNTGRQPGGMVLQVYAGKTDTSVDHPLKVLVAFQKVRLSPGERQVVQLPVRLRDLAYFDEKSHGWTAEAGQYKLYFGTSAADILQTIPITIDERLSFGL

SEQ ID NO: 378 - protein, 876 aa, Ophiostoma piceae
MTANIDIDAVLQSLTLEEKITLLAGKSFWDTAAIPSKGVPSVIFTDGPNGTRGVRIDGSTKAACFPAAVGLASTFDGDIAHNIGVALAEEAGTKGARCLLAPTVCIQRHPLGGRNFETYSEDPFLSGSMAHRMISGIQASGNVVATIKHFVANEQESCRTTSDSRMSERTLREIYLRPFEIAIKSENPPYAVMTSYNRVNGTHADGKKRLIEEILRGEWGWRGLVMSDWGGTNSVGQALEAGLDLEMPGPPRKRTIPAVLDAIKAGTVSVDTIDTRARAILEFIERVGGWDNTEPSSSEGALDRPEHRRLIRDAGSRGIVMLKNANKILPLSTAGAPKTIALIGLAKDALAHGGGSASVNPHYKISPWEGLREALGDKCRFIYAKGTRRLRLLPPLRVLAEKGGVPDTSDDPNPDTKPGGTVHGLDGKPGFTIIFHDADADGQLVKGAKPKVIHGHPMSAFSPLGNLGSENKVVEIVGDFVPKESGSHCLSCSGIGPAQMFINDNLVLDQTTNSPDPMGALFSANTEPEICHAFEAGETYRLRICTRPPTNMAASGLSFLEGRSGVRLGFVLASDRDNQSALLTEAADAAAAADVSIVFTGHDPQWETEGRDQDSFNLPLAQNELVATVAKAAPAGKTVVVNCTGTPVAMPWLSDVGAVLQAWFLGQECGRAIADVITGAMNPEGHLPVSFPRRLEDAPAYGNFGAELTDPEPVVDYAEGVFVGYRFYDQKPASALNFPFGHGLSYTTFSVGSIDVAFNDTEATVSVRASITNTGSVFGGVALQLYAGRSDAVPAPSAPDLPVKALVAFKKVRLSPGASQEVVLEVPLRNLAYFDDVKSQQWLVDPGNYKLSFGFSATDIRQSSNLCLDRLFSFGK

SEQ ID NO: 379 - protein, 814 aa, Pyronema omphalodes
MVSKMSLAEKINITTGTGWQMGPCVGNTGSADSVGFPGLCLQDGPLGVRFADSVTVFPAGITVASTWDRDLMFKRGQALGAEMRGKGVNVMLGPAMMGNRMPAGGRNWEGFGADPVLSGVAVGETVKGIQGEGVIACAKHYIGNEQEIFRQAVEARGQNWAVDEAISANIGGRALREIYAWPFMDAVESGVGSVMCSYNQINNSYACQNSYLLNGLLKDEMNFQGFVVSDWIAQRSGVASALAGLDMTMPGDGRVFADGGSYWGSELTTAVLNSSVPLSRVDDMALRIVAAWYSMGQDSSSYPRPNFSSWFRLPQGPQYFGSDDIGKKAGITINNYTNVKSNHSSLARQIAAESIVLLKNTNNTLPFGSGSNARRSLMVLGEGAMGNKNGVNSCIDRGCNDGTLGQGWGSGSVEYSSFYSPLEAIQEKAREDGTLVSYVTSEADHNRIYATVASYPNSTCIVFASADSGEGYLAAEGHHGDRNDLKLWHNGDRLIQGVASMCKDTVVVIHAVGPVDMESFIEHPNVTAVVLANLPGQEAGSSLTDVLWGGVNPSGRLPYTIGRRLADYGPGGQVMYTPNHPIPQQDFDEGLYIDYRHFDKFNIIPRFDFGFGMSYTTFEFSDINIEVVKTPTEFLPTRNGTVQPPKINSTIPDAKEMLFPADITQIHKYVYPYLSSSSGITRDNTPQPSASTRSLVDTDKLFTSLLKVRAKVKNNGAVAGKAVAQLYMSYPNSTGVDFPVQVLRGFVKVQVEVNQTVDVSFDLMWRDLGYYDEEKGAWRLPVEGGKWGGYKFMVKSSSRGDGVEKDMNREDVGK

SEQ ID NO: 380 - protein, 836 aa, Ogataea parapolymorpha
MSTFDVDDILSQLHVKEKVQLLSLKDFWHTANIDRLNIPSVRLSDGPNGVRGTKFFRSVPSACFSSGTALAATFNMPLLEQLGKLMAEEARHKGAHVILGPTCNIARGPLGGRGFESFSEDPYLSGIAAAAIIKGIESQGIGATLKHFVCNDLEDERNSIDVILSDRALREIYLLPFQIAIKEANPKCVMSSYNKVMGEHVSQSKKLLTDILRKEWGWDGLTMSDWFGVYSIKSSLDAGLDLECPGYPLMRKHDALIHAISSREINMDVIDIRVRNILKLVQHALKSSIPQNAPEDSENNTPETSALLRKAASEAIVLLKNESSILPLKPSDEIAVIGPNARIPRMYGGGSASVNCYYGISVYDGISNKIGSQPPYSMGCDIARNMFDLGKLASYKGEPGVRIKVYKEAPGTPDRSLIEEFRYDSLQLLLFDYNHEKLDSSLFYFDIEGEFTSDKDMSYDIHLSCLGTALLYINGELFIDDKTNQKMGFAAIGASSLGDTKTIHMKKDERIEFKIEFGSAPTFTLETLDLVASNGGGSLTVAIGEKITDQNRINDAVELAKTADKVILCVGTSSDWESEGFDRPHMDLPKSQGILIEEILKVNKNIILVNLSGTPVTLPWIDEIPAVVHGWFNGMESGNAMADVLYGDVNASGKLSLSWPKRCEDNPSFLNFKSDKGKVVYGEDVFVGYRYYEKVCREPLFAFGYGLSYTAFNFDGLDVKVAADNLVCTLNIKNIGKLRGAEVVQLYVIPPLTTTTVSRPLKEFKGCQKVFLEPGQKITTTISVPIKYACSYFDVERQKWSIESGEYGVFIGNSSDAMDALIGKFVIQKPLLWSGL

SEQ ID NO: 381 - protein, 763 aa, Hymenobacter swuensis
MSLGLLTPQLQAQQPATAATARAAAPDPKMTKFIDELLQKMTLEEKIGQLNMITVGFDVTGPVVSKDVDASIKRGSVGSVLNTFTPQAARKLQEMAVKQTRLHIPLIFGYDVIHGHRTIFPIALGLASSWDLPAMERSARIAAEEASADGINWVYSPMVDIARDPRWGRISEGSGEDPYLGSQIARVMVRGYQGDDLKKNNTVMACVKHFALYGAAEAGRDYNTTDMSLVRMYNEYLPPYKAAVEAGAGSMMSSFNDINGVPATGNKWLMTELLRNQWGFDGFVATDYTAINEMTAHGMGDDAQVSALALNAGIDQDMVGEVFLKNLAQNLKDGTVQQAQIDLACRRILEAKWKLGLFEDPYRYTNEKRAKATMMKKEFVADARDIARKSLVLLKNSNNTLPLKKQGTIALIGPLATRQRDMIGSWSGAGDWKQAVSLEQGIKNAVGSGVKVVTAQGANFTDDEQMIARLNQHGGELNVDQRTSEEMIREAVQVAQQADVIVAAVGESQGMTGEAASRADIGLPGQQLELLKALKKTGKPLVLVLMNGRPLTLPWEDKNADAILETWFAGSQAGNAIADVLFGGYNPAGKLTATFPQHVGQVPLYYNHKMTGRPYQGVALDKYKSRYMDVSNDPLYPFGFGLSYTTFEYSKPELSTTTLAMNGTLEVKVTVKNTGNYDGEEVVQLYTRDMVGSISRPVQELKGFQKIMLKKGESRIVSFRLTPEDLKFYNTDLKFAAEPGDFQVMVGGNSRDVQMAAFKLAAQ

SEQ ID NO: 382 - protein, 814 aa, Flavobacterium johnsoniae
MKKTIIKTARVSLLTALVISNLSWNSVSDDENNPPFLTVKGFTFRDLNKNGKLDIYEDTRLSIHERAVDLVKKMTEEEKANFLMGTGMPGFDGIKPVVGAIEGRVPGAAGGTYEIKRLGIPAIIVADGPAGLRIKPIRENDKNTYYCTAFPVGTALASTWNESLIEKVGKAMGNEVKEYGVDVLLAPALNIHRNPLCGRNFEYYSEDPLVSGKIASAMVKGIQLNGVGTSIKHFAANNQETNRLSINEHISERAMREIYLKGFEITVKESNPWTVMSSYNLINGTYTSARKDLLTDILRNEWGFKGIVMTDWFGGFAGAQSIMAGSSNVTEQLSAGNDLLMPGIEAQKKAIIENINNKKLSKEVVDKNVERILELVLRSPIMENYKYSNKPNLKENAQITRQAASEGMILLKNDKNVLPFTNKKGKAAVFGVTSYDFISGGTGSGDVNEAYTISLLDGLKNAGYSIDEELKTTYTPFVAKVKEAEMESRKKEGFLALPKRLPELKLEKQEIAKHAASSELAIITIGRNSGEGGDRKVDNDFNLAQDEVELINNVSEAFHSKGKKVVVILNIGGVIETASWKDKADAILLSWQPGQEGGNSVADVFSGKVNPSGKLTMTFPMKYEDTPSAKNWLGTPADNPANVTYEEGVYVGYRYYNTFNVKPSYEFGFGNSYTTFNYSDVKLSSPVFNNAMTVSVTVKNTGKTAGKEVVQVYLSAPSKSIDKPKEELKAFAKTKELKPGESETLQLVLSPKDLASFLENKNAWIAEAGTYKVLVGASSLDIKKTAEFTVSNEIVVEKVKKAFELDTPFKELKQ

SEQ ID NO: 383 - protein, 448 aa, Paenibacillus polymyxa
MSENTFIFPATFMWGTSTSSYQIEGGTDEGGRTPSIWDTFCQIPGKVIGGDCGDVACDHFHHFKEDVQLMKQLGFLHYRFSVAWPRIMPAAGIINEEGLLFYEHLLDEIELAGLIPMLTLYHWDLPQWIEDEGGWTQRETIQHFKTYASVIMDRFGERINWWNTINEPYCASILGYGTGEHAPGHENWREAFTAAHHILMCHGIASNLHKEKGLTGKIGITLNMEHVDAASERPEDVAAAIRRDGFINRWFAEPLFNGKYPEDMVEWYGTYLNGLDFVQPGDMELIQQPGDFLGINYYTRSIIRSTNDASLLQVEQVHMEEPVTDMGWEIHPESFYKLLTRIEKDFSKGLPILITENGAAMRDELVNGQIEDTGRHGYIEEHLKACHRFIEEGGQLKGYFVWSFLDNFEWAWGYSKRFGIVHINYETQERTPKQSALWFKQMMAKNGF

SEQ ID NO: 384 - protein, 521 aa, Oryza sativa [sequence omitted]

SEQ ID NO: 385 - protein, 510 aa, Oryza sativa
MAAAGAMPGGLLLTFLLLAVVASGAYNSAGEPPVSRRSFPKGFIFGTASSSYQYEGGAAEGGRGPSIWDTFTHQHPEKIADRSNGDVASDSYHLYKEDVRLMKDMGMDAYRFSISWTRILPNGSLRGGVNKEGIKYYNNLINELLSKGVQPFITLFHWDSPQALEDKYNGFLSPNIINDFKDYAEICFKEFGDRVKNWITFNEPWTFCSNGYATGLFAPGRCSPWEKGNCSVGDSGREPYTACHHQLLAHAETVRLYKAKYQALQKGKIGITLVSHWFVPFSRSKSNNDAAKRAIDFMFGWFMDPLIRGDYPLSMRGLVGNRLPQFTKEQSKLVKGAFDFIGLNYYTANYADNLPPSNGLNNSYTTDSRANLTGVRNGIPIGPQAASPWLYVYPQGFRDLLLYVKENYGNPTVYITENGVDEFNNKTLPLQEALKDDARIEYYHKHLLSLLSAIRDGANVKGYFAWSLLDNFEWSNGYTVRFGINFVDYNDGRKRYPKNSAHWFKKFLLK

SEQ ID NO: 386 - protein, 518 aa, Nannochloris
MDVTCWKYAIPGEPGGELTAEEVFASKDTAFPEGFLWGAATAAYQIEGAAAEDGRGPSMWDTFSKIPGKIDNGDTGDVACDHYHRYKEDVKLMKGMGLKSYRFSVSWSRVLPEGTGAINPKGMEFYQNLTNELIANGIVPTVTLYHWDLPEALSKNGGWLNEDTAVAFGQYADVMFQALGDRVKLWFTLNEPWTTAIAGYGQGGHAPGLKNMAENPYMAGHNQLLGHAAAVKVYREKYQEKQGGKIGAVLSTEWKEPLCHTQEDKDAAERSLIWYLAWFADPIYKGDYPEEMKERVGDRMPAFTEQQKQDLKGSADFFGINHYATNLLQGPTEKIGAENYFSDLNGWIMMDPRWAVGDASWLSVVPWGMRRLLRWIKHRYDDPVVYVTENGLSVPNESAMTPEAALNDKMRVDYLQGYVAEMWKAINYDKVKVAGYYHWSLLDNFEWSDGYKVRFGLVQVDYKTQKRTLKESAKVYKDMIAKYSGDTAPPDDAEAVARDAVKATPSAEAPLEHHHHHH

SEQ ID NO: 387 - protein, 451 aa, Halothermothrix orenii
MAKIIFPEDFIWGAATSSYQIEGAFNEDGKGESIWDRFSHTPGKIENGDTGDIACDHYHLYREDIELMKEIGIRSYRFSTSWPRILPEGKGRVNQKGLDFYKRLVDNLLKANIRPMITLYHWDLPQALQDKGGWTNRDTAKYFAEYARLMFEEFNGLVDLWVTHNEPWVVAFEGHAFGNHAPGTKDFKTALQVAHHLLLSHGMAVDIFREEDLPGEIGITLNLTPAYPAGDSEKDVKAASLLDDYINAWFLSPVFKGSYPEELHHIYEQNLGAFTTQPGDMDIISRDIDFLGINYYSRMVVRHKPGDNLFNAEVVKMEDRPSTEMGWEIYPQGLYDILVRVNKEYTDKPLYITENGAAFDDKLTEEGKIHDEKRINYLGDHFKQAYKALKDGVPLRGYYVWSLMDNFEWAYGYSKRFGLIYVDYENGNRRFLKDSALWYREVIEKGQVEAN

SEQ ID NO: 388 - protein, 875 aa, Neurospora crassa
MKFAIPLALLASGNLALAAPEPIHPSHQQLNKRSLAYSEPHYPSPWMDPKAIGWEEAYEKAKAFVSQLTLLEKVNLTTGIGWGAEQCVGQTGAIPRLGLKSMCMQDAPLAIRGTDYNSVFPAGVTTAATFDRGLMYKRGYALGQEAKGKGVTVLLGPVAGPLGRAPEGGRNWEGFSTDPVLTGIAMAETIKGTQDAGVVACAKHFIGNEQEHFRQVGESQDYGYNISETLSSNIDDKTMHEMYLWPFVDAIRAGVGSFMCAYTQANNSYSCQNSKLLNNLLKQENGFQGFVMSDWQAHHSGVASAAAGLDMSMPGDTMFNSGRSYWGTNLTLAVLNGTVPQWRIDDMAMRIMAAFFKVGQTVEDQEPINFSFWTLDTYGPLHWAARKDYQQINWHVNVQGDHGSLIREIAARGTVLLKNTGSLPLKKPKFLAVIGEDAGPNPLGPNGCADNRCNNGTLGIGWGSGTGNFPYLVTPDQALQARAVQDGSRYESVLRNHAPTEIKALVSQQDATAIVFVNANSGEGFIEIDGNKGDRLNLTLWNEGDALVKNVSSWCNNTIVVLHTPGPVLLTEWYDNPNITAILWAGMPGQESGNSITDVLYGRVNPSGRTPFTWGATRESYGTDVLYEPNNGNEAPQLDYTEGVFIDYRHFDKANASVLYEFGFGLSYTTFEYSNLKIEKHQVGEYTPTTGQTEAAPTFGNFSESVEDYVFPAAEFPYVYQFIYPYLNSTDMSASSGDAQYGQTAEEFLPPKANDGSAQPLLRSSGLHHPGGNPALYDIMYTVTADITNTGKVAGDEVPQLYVSLGGPEDPKVVLRGFDRLRVEPGEKVQFKAVLTRRDVSSWDTVKQDWVITEYAKKVYVGPSSRKLDLEEVLP

SEQ ID NO: 389 - protein, 472 aa, Micrococcus antarcticus
MMNHLSQKFAWPKEFLWGSATAAAQIEGAGHSYGKEDSVWDAFARKEGAIAGGENLEVAVDHYHRYREDVQLMRELGLDSYRFSTSWARVVPGGRTVNPEGLDFYSRLVDELLENGILPWLTLYHWDLPQALEERGGWTNRETSYKFLEYAETVHEKLGDRVKHWTTFNEPLCSSLIGYAAGEHAPGRQEPQAALAAVHHQHLAHGLATARLRELGAEHIGITLNLTNAVPNNPGDPVDLEAARRVDALWNRMYLDPVLRGSYPEDLLEDVQGLGLAEVIEAGDLEIISQPIDFLGVNHYHDDNVSGHPLPAGQPQPVVPTDSPKSSPFVGSEYVTFPARDLPRTAMGWEVNPEGLRVLLNRLNQDYANLPSLYITENGASYTDTVTEAGTVEDPEREEYILNHLDAVVRAIADGVDVRGYFVWSLLDNFEWAWGYAKRFGIIHVDYQTQVRTIKNSGKAYAGLIAANRTMA

SEQ ID NO: 390 - protein, 448 aa, Exiguobacterium antarcticum
MKFAPNFVFGTATSSYQIEGAHDEGGRTPSIWDTFCDTDGKVFEKHNGDVACDHYHRFEEDIQHIKQLGVDTYRFSIAWPRIFPSKGQFNPEGMAFYKTLATRLQEEGIKPAVTLYHWDLPMWAHEEGGWVNRDSVDWFLDFARVCFEELDGIVDSWITHNEPWCAGFLSYHLGQHAPGHTDMNEAVRAVHHMLLSHGKAVEMLKGEFNSATPIGITLNLAPKYAKTDSINDQIAMNNADGYANRWFLDPIFKGQYPVDMMNLFSKYVHTYDFIHAGDLATISTPCDFFGINFYSRNLVEFSAASDFLHKDAYSDYDKTGMGWDIAPSEFKDLIRRLRAEYTDLPIYITENGAAFDDQLVDGKIHDQNRIDYVAQHLQAVSDLNDEGMNIAGYYLWSLLDNFEWSFGYDKRFGIIYVDFDTQERIWKDSAHWYANVIQTHKAALPQEA

SEQ ID NO: 391 - protein, 431 aa, Thermus thermophilus
MTENAEKFLWGVATSAYQIEGATQEDGRGPSIWDAFAQRPGAIRDGSTGEPACDHYRRYEEDIALMQSLGVRAYRFSVAWPRILPEGRGRINPKGLAFYDRLVDRLLASGITPFLTLYHWDLPLALEERGGWRSRETAFAFAEYAEAVARALADRVPFFATLNEPWCSAFLGHWTGEHAPGLRNLEAALRAAHHLLLGHGLAVEALRAAGARRVGIVLNFAPAYGEDPEAVDVADRYHNRFFLDPILGKGYPESPFRDPPPVPILSRDLELVARPLDFLGVNYYAPVRVAPGTGTLPVRYLPPEGPATAMGWEVYPEGLHHLLKRLGREVPWPLYVTENGAAYPDLWTGEAVVEDPERVAYLEAHVEAALRAREEGVDLRGYFVWSLMDNFEWAFGYTRRFGLYYVDFPSQRRIPKRSALWYRERIARAQT

SEQ ID NO: 392 - protein, 465 aa, Trichoderma harzianum
MLPKDFQWGFATAAYQIEGAIDKDGRGPSIWDTFCAIPGKIADGTSGVTACDSYNRTAEDIALLKSLGAKSYRFSISWSRIIPKGGRDDPVNQLGIDHYAQFVDDLLEAGITPFITLFHWDLPEELHQRYGGLLNRTEFPLDFENYARVMFKALPKVRNWITFNEPLCSAIPGYGSGTFAPGRQSTTEPWIVGHNLLVAHGRAVKVYRDEFKDLNDGQIGIVLNGDFTYPWDSSDPLDREAAERRLEFFTAWYADPIYLGDYPASMRKQLGDRLPEFTPEEKAFVLGSNDFYGMNHYTSNYIRHRTSPATADDTVGNVDVLFYNKEGQCIGPETESSWLRPCPAGFRDFLVWISKRYNYPKIYVTENGTSLKGENDLPKEKILEDDFRVNYYNEYIRAMFTAATLDGVNVKGYFAWSLMDNFEWADGYVTRFGVTYVDYENGQQRFPKKSAKSLKPLFDELIAKE

SEQ ID NO: 393 - protein, 744 aa, Hypocrea jecorina; identical to SEQ ID NO: 217

SEQ ID NO: 394 - protein, 479 aa, Unknown
  Streptomyces sp.
MVPAAQQTATAPDAALTFPEGFLWGSATASYQIEGAAAEDGRTPSIWDTYARTPGRVRNGDTGDVATDHYHRWREDVALMAELGLGAYRFSLAWPRIQPTGRGPALQKGLDFYRRLADELLAKGIQPVATLYHWDLPQELENPGGWPERPTAERFAEYAAIAADALGDRVKTWTTLNEPWCSAFLGYGSGVHAPGRTDPVAALRAAHHLNLGHGLAVQALRDRLPADAQCSVTLNIHHVRPLTDSEADADAVRRIDALANRVFTGPMLQGAYPEDLVKDTAGLTDWSFVRDGDLRLAHQKLDFLGVNYYSPTLVSEADGSGTHNSDGHGRSAHSPWPGADRVAFHQPPGETTAMGWAVDPSGLYELLRRLSSDFPALPLVITENGAAFHDYADPEGNVNDPERIAYVRDHLAAVHRAIKDGSDVRGYFLWSLLDNFEWAHGYSKRFGAVYVDYPTGTRIPKASARWYAEVARTGVLPTA

SEQ ID NO: 395 - protein, 480 aa, Streptococcus pyogenes
MLAFPKEFWWGGATSGPQSEGRFAKQHRNLFDYWYEEEPDLFYDYVGPDTASDAYHQIESDLTLLASLGHNSYRTSIQWTRLIDDFEQATINPDGLAYYNRVIDACLANGIRPVINLHHFDLPIALYQAYGGWESKHVVDLFVAFSKVCFEQFGDRVKDWFVHNEPMVVVEGSYLMQFHYPAIVDGKKAVQVAYNLALATAKVIQAYRRGPAELSDGRIGTILNLTPAYPASQSEADMAAAHFAELWNNDLFMEAAVHGKFPEELVAVLKKDGVLWQSTPEELALIAENRVDYLGLNFYHPKRVKAPDAIPVISPSWSPEWYYDPYLMPGRRMNVDKGWEIYPEAVYDIAIKMRDHYDNIPWFLSENGVGISGEDRYRDETGQIQDDYRIQFLKEHLTYLHKGIEAGSNCFGYHVWTPIDGWSWLNAYKNRYGLVENNIHTQVRRPKASAYWFKKVATHNRLISLEVMEEFGGSASHLSD

SEQ ID NO: 396 - protein, 425 aa, Trifolium repens
LLSITTTHIHAFKPLPISFDDFSDLNRSCFAPGFVFGTASSAFQYEGAAFEDGKGPSIWDTFTHKYPEKIKDRTNGDVAIDEYHRYKEDIGIMKDMNLDAYRFSISWPRVLPKGKLSGGVNREGINYYNNLINEVLANGMQPYVTLFHWDVPQALEDEYRGFLGRNIVDDFRDYAELCFKEFGDRVKHWITLNEPWGVSMNAYAYGTFAPGRCSDWLKLNCTGGDSGREPYLAAHYQLLAHAAAARLYKTKYQASQNGIIGITLVSHWFEPASKEKADVDAAKRGLDFMLGWFMHPLTKGRYPESMRYLVRKRLPKFSTEESKELTGSFDFLGLNYYSSYYAAKAPRIPNARPAIQTDSLINATFEHNGKPLGPMAASSWLCIYPQGIRKLLLYVKNHYNNPVIYITENGRNSSTINTVTSRIPF

SEQ ID NO: 397 - protein, 857 aa, Talaromyces emersonii
MRNGLLKVAALAAASAVNGENLAYSPPFYPSPWANGQGDWAEAYQKAVQFVSQLTLAEKVNLTTGTGWEQDRCVGQVGSIPRLGFPGLCMQDSPLGVRDTDYNSAFPAGVNVAATWDRNLAYRRGVAMGEEHRGKGVDVQLGPVAGPLGRSPDAGRNWEGFAPDPVLTGNMMASTIQGIQDAGVIACAKHFILYEQEHFRQGAQDGYDISDSISANADDKTMHELYLWPFADAVRAGVGSVMCSYNQVNNSYACSNSYTMNKLLKSELGFQGFVMTDWGGHHSGVGSALAGLDMSMPGDIAFDSGTSFWGTNLTVAVLNGSIPEWRVDDMAVRIMSAYYKVGRDRYSVPINFDSWTLDTYGPEHYAVGQGQTKINEHVDVRGNHAEIIHEIGAASAVLLKNKGGLPLTGTERFVGVFGKDAGSNPWGVNGCSDRGCDNGTLAMGWGSGTANFPYLVTPEQAIQREVLSRNGTFTGITDNGALAEMAAAASQADTCLVFANADSGEGYITVDGNEGDRKNLTLWQGADQVIHNVSANCNNTVVVLHTVGPVLIDDWYDHPNVTAILWAGLPGQESGNSLVDVLYGRVNPGKTPFTWGRARDDYGAPLIVKPNNGKGAPQQDFTEGIFIDYRRFDKYNITPIYEFGFGLSYTTFEFSQLNVQPINAPPYTPASGFTKAAQSFGQPSNASDNLYPSDIERVPLYIYPWLNSTDLKASANDPDYGLPTEKYVPPNATNGDPQPIDPAGGAPGGNPSLYEPVARVTTIITNTGKVTGDEVPQLYVSLGGPDDAPKVLRGFDRITLAPGQQYLWTTTLTRRDISNWDPVTQNWVVTNYTKTIYVGNSSRNLPLQAPLKPYPGI

SEQ ID NO: 398 - protein, 448 aa, Hungateiclostridium thermocellum
MSKITFPKDFIWGSATAAYQIEGAYNEDGKGESIWDRFSHTPGNIADGHTGDVACDHYHRYEEDIKIMKEIGIKSYRFSISWPRIFPEGTGKLNQKGLDFYKRLTNLLLENGIMPAITLYHWDLPQKLQDKGGWKNRDTTDYFTEYSEVIFKNLGDIVPIWFTHNEPGVVSLLGHFLGIHAPGIKDLRTSLEVSHNLLLSHGKAVKLFREMNIDAQIGIALNLSYHYPASEKAEDIEAAELSFSLAGRWYLDPVLKGRYPENALKLYKKKGIELSFPEDDLKLISQPIDFIAFNNYSSEFIKYDPSSESGFSPANSILEKFEKTDMGWIIYPEGLYDLLMLLDRDYGKPNIVISENGAAFKDEIGSNGKIEDTKRIQYLKDYLTQAHRAIQDGVNLKAYYLWSLLDNFEWAYGYNKRFGIVHVNFDTLERKIKDSGYWYKEVIKNNGF

SEQ ID NO: 399 - protein, 461 aa, Lactobacillus plantarum
MVEFPEGFVWGAATSGPQTEGNFHKQHQNVFDYWFATEPEQFDAGVGPDTASNFYNDYDHDLALMAQAGVQGLRTSIQWTRLIDDFETASLNADGVAFYNHVIDSMLAHHITPYINLHHFDLPVALYDKYHGWESKHVVELFVKFAEQCFKLFGDRVDHWYTFNEPKVVVDGQYLYGWHYPQVINGPKAVQVAYNMNLASAKTVARFHELCVRPEQQIGIILNLTPAYAASDDPADLAAAEFAELWSNNLFLDPAVLGHFPEKLVERLTMDGVLWDATPTELAIIAANPVDCLGVNYYHPFRVQRPDISPKSLQPWMPDIYFKEYDMPGRMMNVDRGWEIYPQAMTDIARNIQKNYGNIPWMISENGMGVAGEERFLDKQGVVQDDYRIDFMKEHLTALAKGIAAGSNCQGYFVWSGIDCWSWNHAYHNRYGLIRNDIHTQTKTLKKSAKWFAELGERNGF

SEQ ID NO: 400 - protein, 467 aa, Agrobacterium tumefaciens
MDDERAYPMTDHKALAARFPGDFLFGVATASFQIEGATKVDGRKPSIWDAFCNMPGHVFGRHNGDVACDHYNRWEDDLDLIKEMGVEAYRFSIAWPRIIPDGFGPINEKGLDFYDRLVDGCKARGIKTYATLYHWDLPLTLMGDGGWASRSTAHAFQRYAKTVMARLGDRLDAVATFNEPWCAVWLSHLYGIHAPGERNMEAALAAMHHINLAHGFGVEASRHVAPKVPVGLVLNAHSVIPASNSDADMKAAERAFQFHNGAFFDPVFKGEYPAEMIEALGSRMPVVEAEDLSIISQKLDWWGLNYYTPMRVADDATEGAEFPATKQAPAVSDVKTDIGWEVYAPALHSLVETLYERYELPDCYITENGACYNMGVENGEVDDQPRLDYYAEHLGIVADLVKDGYPMRGYFAWSLMDNFEWAEGYRMRFGLVHVDYETQVRTLKNSGKWYSALASGFPKGNHGVMKG

SEQ ID NO: 401 - DNA, 2448 bp, Artificial Sequence
  6xHis UPI00049B1A8C
atgcaccaccaccaccatcacgaaaatctatatttccagggctctatgactctcgtggaaaaagtgaatctcacaatgggggttggctcgggtatgggcgtatgcgccggctggacgggcagcgtcccgcgacttaacattactccgaaatgccttcaagatgccccccttggtgtgcgcagcgccgacttagtatctgtgtttccttgcggcctggccaccgcctcgacgttcaacaagcagctgttttatgacaaacacgtagccattggctccgagtttaaaggtaaaggtattgatgttgcgctgggtccggtgtatggcccgatgggagttaaagctcagggtggccgcggctgggaaggacatggcccagatccgtacttagaaggtatcgcagcggcacttggtacagtgggtctgcagagtcagggtgttgtatcgtgtgccaagcatctggtgggcaatgaacaggagcattaccgctttgcgaccgattttgagaagcgcaccatggattacagtcataacgtgaccgaatctatctcggtgaatatcgacgatcgcagtttacacgagatttatctctggccgtttgctgaagctgtgaaagcgggcgtgacaagcgttatgtgtagctataatcgtgtgaatcagtcccatgcctgtcagaattcgtatctcctgaattacctgttgaaagacgaattgggctttcagggtttcgtggtgtcagattggaatgccgtatatagtggagtggattctgccattgcaggcttagatctggacatgccgggggaagataattactttggttctaacttgacgatggcagcattaaatggttcactgcctattgatcgcttagatgacatggtgacccgttttctggcgggtcttatttatgcgggagttcataatccggacggcccaaatttccatgccggcacctttgaaacgtacggccaggaattttttggtgctaaagcaggaccggtgatcgaattgaatcaacatgtggatgtgcgtagcgatttctctcgttttgtttccctgaagacggctactgagggtattgtgctgctgaaaaatgaaaacaatacgctcccactcagcaaggagaaatacaatcgtatcgccctgctaggtcgggcggcgagcgatgatgaacaaggcacgtattgccataggtttggttgcggtaccggtgcaatggggacgggatacggctctggcgcgggccagttctcgtatttcgtgacgccaaaagatggcattggggcccgccttacgaaagaaaaaatttcatgggaatatgttccggataactggaatcaagcaagcgcgatgacgtcagcgggatatagcgatgcagccatcattgttggtacaagcgcaagcggtgaagaaactttcagcctgctgggtaattacggagatccgaacaacctcaccctctggcataatgccgaggaactgattaaaaacgtcactaccgtcaataataataccatcttggtcttgaccgcgggtatgcagattgatctggagccgtttattgataacgaaaacgtaaccgcggtaatttactcaagctacctgggcgaagacttcggcaccgcacttgcggctgtgttgtttggggacgtgaatccgtcgggtcgtttaccgtttaccattgcgaaagacacaagtcactacatccctgtcgttaaaaatgtgaccatcgatgaaccccaggataatctctacgaagcaggtatctatgtggattatcgttattatgataaacatgacttggatgtacgctatgaattcggctatggcttaagctactcgaattttacgctgtctgacctatcattgagtgtagtagaagagttttcagaaacgattgaggatgatgtggacgattatttaccggtctttgaatacgatgacaccgatctgtcagcggaagaagcccgcgtccctagtggctttaccaaaattaagggctgggtgtatccgtatatctcatccaacgccacagtgaaacgtggcaattatacctacccgcccggttattttactgaacagctgtcgaaaccggtgagtaaagcggggggtgcgccgggcggaaacccgcatctgtgggatgttgggtatgtaattaatgtgaaaactaccaacgagggcccgtacgacggcgcctttgtgccccagctctatgtaagttttccggacgatgacgagtttgatacccctccggtccagctacgcggattcgataaagtggacctgcaggtgggtcgtagcgcgtggagcacgttcgaggttacccgcaaagatctgtcggtttgggatacaactactcaggaatggcgcgtgctacgcggggaatataaattctacgtcggcagcagctcccgcaaactggatttagtagagaccgtcacaatttga

SEQ ID NO: 402 - DNA, 2196 bp, Artificial Sequence
  6xHis UPI0004E3EF7B
atgcatcaccatcaccaccacgagaacttgtactttcagggaagcatgaaaaaaagcaccctgttcattttatttcttctgggtatcaacaatttctacggccagaatcggagcgataaggaagcacttcagatcgccaatgacctgctgtctaagatgacacttagcgaaaaagtactgctaatccacggtgatcacatctactcttccccgggtctggaacgcctgggcattccgcgtttctatccgagcgatggtccgtgttcgattcgtcctgaattaactgataagggtgaatacctgcacgccggcgatactattgattgcgctaccgcattccctacactgtctgcgctctcggccacctggaatccgcagttagcgaatcagtttggggatgctatcagctccgaattacgtgcgcgcggcaaagacatgtacttggggccgggtgtgaatattatgcgtaccccgatttgtggccgtaactttgaatatatgggagaagacccatttctgacctcctctatggcggttccgctggtgaaaggagtacagaaaaacaatgtgagcgcctgcatcaaacactttgccctgaataaccaggagttggaacgattcagcgtgaatgtagtggcgtctgaacgtgcgttacatgaaatctactttcctgcatttgaagccgcggtaaagaaagggggcactctgggcctgatgggagcgtataataaaataaatggcgattggtgttgtgaaagcgatttcttgctgaacaaaaccctgaagcaggattggggatacaagggcgtggttatttctgattggggcgctgtgcattcacttatcaaagcggtgcaggcaggatgcgattacgaatcgggaaatagttcgcattatggacatattgaaaaggcgatcaacgaaggcaaattaagtgtgagcgatgtggacgaaaaaacgcgtcgtctgctgtgggtgtttgcgaaaattcgtatggtaggtccgggcagtgaacagcgcgaaaaggggaaactccgcacggagtcgcacaagatggttgcccgcaaaatcgccgaagaatcaatcgtgttgctcaaaaacgacgagcagatcctgccgttggacaaaaacaaaattagcaaactactgatcgttggcaaaattgccaatgcccgactgaccattgatgttaacacgaaaggcccgtgcgatttattgaccggtggtggctcaggtgaagcgaaacccctgtatgaaattacgcctctggaaggcatcaagcgttatttgtcgacctctgccaacgtcgaatacattgaaagcgctaactatagcgatgcgtcgttcattcaaaaggtgaaaacagccgatgtcgttattgccttcaccggtaatacgcatgccgaggagcaggaaggccaggatcgtaaggatatcacactgccggagggtcaggatgagatggttaaagcggttctggccattcaacctaaagcagttattattaatcagtccggcgccccggttgcaatgccttggtcgaaccaggcaaaagccattgtgcaaaactggttcaacggtcaggagaacggcaatgcgcttgcccgcgtcatatttggtgatgtgaatccgtcgggaaaactgagtagcacctttccgaaacagttgtcggatgttgcatgtcatagcttggatgcatacaaagccgtgtcggagaattacaaagaggatattctcgttggctatcgctggtacgataaacagaatattgatccgctttttgcgttcggtcatggcctgagctacgcaaaattccagtatggaaaaattaaaattacccagctgaagaaaggaaacacgatcaaagtcatcattcctgtgaaaaacatttcaaaccgtgcgggtgcagaagtcgttcaactatacattcatgagaacacgccatcggtgctgcgtcctaatcaggagctaaagggctttcagaaggtccagattgcggctaatgagaccaaggaagttgtgttgtacctgaccgcgaaggacttcagctattggtctgaaaccgcgcatgattggaaatacgacttcggcaactatgagattaaagtaggtagcagtagccgcgatattcgcgtgaataagaaaatcgtcctcgaaaaagacttcgcaattaagctgccgactagcggactgtga

SEQ ID NO: 403 - DNA, 2424 bp, Artificial Sequence
  6xHis UPI00050EE490
atgcatcaccatcatcatcatgaaaatttgtacttccaagggagtatgtttatgaaacagaaccagaacattattaagtccatctgtcttatactggtctttttcaacctgtcggtgattcagagtcaggagaacaaaccctttttaacagaggaactgagcattaaggtcgatgcgctgatggcgaccatgtcgatggatgagaaactcgcgcagatcaccggaacccgtctacgcgatattatggttgatggcaaggtttcaatagaaaaatgccgcgagcatatcccgcacggtattggccacttttgtcagttctctagcggcttaaccctggaacctgaacagctacgtgacctcgttcgtgaggtgcagcactacctgatgaccgaaaccaacacgaaaattccggcgattttccacgaggaggctataaccggttttgcgacacagggtgccacgaccttcccgcagcagatcggcgtgggttgcagctggaatccggagattgttaaaaataacgccaattccaccgcccagagtatgcgcgccgcgggagcaaccttcgctctgagtccgatgcttgatctgagtcgtacagctcattggaaccgactggaagaatcgtatggtgaagatgcgtacctgaccagcaggatgggcgtagcttttattaagggactgcagggtaacgatctgaaaaccggggttgcggccactgcaaagcacttcgcgggctacggaacggccaatgacaacgccaaagaactgtatgaggaatacttaatgcctcatgaagccgcgttcaaagttgctggcgcaaaaagcgtaatgccgtcctacgggaaatacaaagccctggcggtgagcgccaatccaaccatgctggaccaaatgttacgcaaggagattggattcgatggtttagttgtcagtgattatggcgctgttaacctgatatataaaggtcacaaacaagcgaaaaacagtgcaatggccggggcaatggcaattaacgcaggtgtggatatcgaactgtcgagtccaattgcatttccgctgctgccggatgctatcaaagatggcctggtgactgaagaaacgattaacaaggctgtgaaacgttccctcgtgatgaaagccaagctcggcctcttagataaaaaccttaaaattggtaaagacggtcctctggactttgacccgccgtcaaatcgcgaacttgcctacaaaacggcgtcccaaagtattgttcttctgaaaaataatggagtgttaccgctgaattcggacattaaaaagattgcgctggtgggcccgaacgcgtcaacctatcattgcctcctgggggattacacctaccagtcgatgataagcttttggcacagtacagatttcgatcctacgaacccgaagcttattaccctcctccagggcctcgaaaataaactgggcgagaacgtcgaaatcaatgtagaacgaggatgtgattggagtgcaccgctggaaagtaagattgataccagcgggctgggcgatgaccgcctgagtaaattaaaaatgctgaccgtcaaggggctgcctcagccggatctccaaaaagccattaagattagcgaagaatccgacgtcattatcgccgcagtaggcgaaaacctttatctatgcggtgaaggtcgcgaacgaaaaggcattcgcctccccggtgaacaggaagcctttgtagaaaagttaatcgccaccggcaaacctgtgatcctggtgcttttcggtggccgacagcagttagtcagcaaattcgaagacaagtgtgccgccattgtacaggcgtggttcccgggggaagaagggggcaacgccatcgccgacatcttggttggcaatgttaatcccagcgcgaagctgtgtgtgacctatccgaaaaccgaaagtcgcgccgaaattaactacaaaaatggctatggcaacggggacttggtgcagtatccgttcggtttcggcttatcgtacaccgattatcagtattcaaatctgaagattaaaagcaaaatcgacattaatgatgagcgctttagcgtgagcctgaaggtaaaaaacattggcgatatggatggcacggaaattgtacagctttacatgagcagcattgacaaagcttcgacccagaaaccgatccaactgaagggtttcgaacgagtgaaacttaaagcgggggaggaaaagacgttgacgttcaatgtcagcccggaacagttcgttcaatacaagaacaacaagtggatcgtggaatcaggtaaatatcagttaaaagtgggtgcatccagtacggatattcgcctggaaggcgtgatcgagctgaaaggaaaggatgttatcctggaaaacggccgcgacgtgtttttcacgatgaataaaacgaaatga

SEQ ID NO: 404 - DNA, 2409 bp, Artificial Sequence
  6xHis UPI0005ECB51E
atgcaccaccatcatcatcatgagaacttgtattttcagggatccatgactttaccgccatttgatgtcgatacggtgctagccgcgcttacgttggaagagaaagcgagcctgttatcaggcctagatgactggtatacccagccgttagatcgtcccggtctgccccagcgcgtcccgagcatagaagttggcgatggaccgcatgggttgagaaaagaaactggcgtagatatggtttgggtacctgcgacaggtttcccgaccgcgtccgctatgggagcgtcatgggaccgccagttaatgcggcgcgtggctgccgccattggcgaagaagcacgggcggagggggttcaggtcgtgttaggcccgggtgtaaacatgaaacgttcaccgctgtgcggtcgaaacttcgagtatttttcggaagacccggtacatagtggcgaactgggcgcggcgtacgttgatggcgtgcaggcagtcggcgtgggtacatcactgaagcattttgcagcaaacaaccaggaaatcgaacgcacccgcattagcgtggtggctgacgaacggaccttgcgtgaaacctatctgagtgcctttgaacgtgtggtgactaaagctgacccttggacggtaatgtgtagctataaccgcttgctgggcgttcatgcctcccagaatcattggctgctcacggaagttctacgtgatgagtgggggtatcgtggagcagtggtatcagattggaatgcggttcacgatcgggttgccgcacttcgcgcaggactagatttagaaatgccaggcacacagggggccaccgatgcggaaatcgtggccgcagtgcaggatggccagctggatattggtgtagtggacgccgccgcacgtcgtgtgctggagcttgttgcccgcgcgtacccgggggccgatcgcgtcaacggggccgtaatggacttaggccatgcggcaggtgatcgtctgaccgcagaacaactacgcttattgcgtgcagccgaacatcatgaactggcccgtgaggcagcgattggttctatgacattactgcgtaacgaaactattccggggggcggtggccctgcactccctctggaagaacactcggaaggcgcggtcgccgtagttggcgcgtttgcggaacatgctcgcgttcagggtggtggcagcagcggagtagatccgacacgtattgatgccccccttgcggcgattcgtgcaattgcgaatggacgtgtacattatgccccgggatacatttacgaagtgaagaatgcctatcaggatgataatttagcaattctcgcggcccacggcgtcgtaaccgaggaagaaaaacctcgtgttgcacgccgtagtgcgaccttagccaaagagctgcaattagcggaagccgttcagcacctgggtaaacgcccgttatctgcagcggcggaacgcctgatcgacgaagcggccgtcatcgctggccaagctgagacgattgtggtatttgccggtttgccgctctcctacgaacaggaggctaatgaccgtgatacattggcgctgccggcggatcaggtggcactcattttgcgcatggcggatgtacgtgaaaagaccggcgcacgcctggtggttgtgttaagcaacggcagtccggtgactatggatccgtggcatgatcgtgtggatgcaattgtagaagcgtggctgggcggtcaagcagtgggttccgcagtagcagaagttttatttggccggagcaacccaagcggcaagttggcagagacttttccactggccttagaagacaccccaggcttccccaattggctaggagaaagaggaaccgtcctttatggtgaaggagtttttatcggctatcgttggtatgatgcgctgcgtagagaggttcgctatccttttggccacggcctgtcatataccacattcagctattctgatttacgcgtggacctggtagatgccgaagtaggacgcgtgaccgtaacatgcactgttaccaataccggtgatgtggcgggccaggaagttgtgcagttatacgtcggcgatcctgatgctgaggtacagcgcccgctgcgtgagttacgcggttttgaaaaagttaaaatcgaggcgggagaaagcacccgtgttcgctttgaactgctcaatcgggatttcgcgtattgggattcagctgcggttcgcccggatggtaaaaccggcctgtggcgtcgcgaaggaggcgaatttcgtatcgaagtaggtgcatcaagccgtgacatacgtctgtcggaaagcattgtattgtcagatgacccgtccatcccaccgctcgtgccggatgcggagctgttggacattgccgcctctcgatttgtgcaagggcatgcagggtga

SEQ ID NO: 405 - DNA, 2550 bp, Artificial Sequence
  6xHis UPI0006588DAD
atgcatcatcaccatcaccatgaaaatctatattttcagggtagtatgtcggagctggtagagaacctgatcctgcgtctaaccctagaagaaaaagcgacactcacctcgggcaccgatatgtggaatgcgcatggtatcgaccgcctgggcattcctggactgaaagtaagcgatggcccggttggtgttcgtggggaacgttgggttggtactacatcagcctgtacaccgtgcggtacagcgctgggcgcaacctggaatatggaattaatagaacaagttggcgtggtgctgggcgaggaagccaagtcaaagtcggttgatattgtcttggctcccaccgttaatctgcatcgcaaccctctggcagggcgtaatttcgagtgcttttcggaagacccgtttttgactggtctggcggcaaccgctattattaacggcattcagtcagcgggggttggcgcctgtgtaaaacactttgttgctaatgattcggaataccagcggcataccatcagcagtcaggtgtcagaacgggtgctgcgtgaactgtatctattaccgtttgagatggttattcgcgatacggacgtagtagcagtgatgtcaggatacaaccgcctgaacggaacgtattgtgcagagcacgactggctgctgaatcagatcctgaaacaggaatggggattcgatggactcgtcatgtcagattggtggggcactatgagctcagcatctgccgcaggcgggctggatttggaaatgccgggacccgccaaatatttggggcctcagctggcacaaatggtagcagatggcacactggatgcgaccgctcttgatgaaatggcacgccgtattctccatgtcagcgaacgacttggcctgttggcacacagcagtcccgcgaccccatctagagcagcggaacgttcagaagacctgccgacacaccaggcaatccttcgctcggccgccgagcaagccgttgtcctgttaaccaatcgtctgattgaaggtcaaaccgtgctgcctctggatgtgtcctcattacgacacgttgcagtgatcggcccaagcgcagacacagccgccgttttaggcggcggctctgcggcggtcaacccccactatgcggtgtctattcttcaaggcttacaggaagcgctgccttcccacgttaaagtgacgcacgaaattggggtacacgccagtcactccgctccgcccattgactctcgttgcctgcgcagcgccgtgcagcctgataaaccggggttagatgttgaatattttgcgaaccgcgaatttgccggcaccccagcatgcgtggaacatgctgcccagcctcgcttagtgtggatgggttcggaagcggcgagcggcgtggcgactaacaacttatcggtccgtgtgtccggtacgttcattgcgcgttccactggcactcacacctttgccttagtgacggggggaaccggcggacgtgttttgctggacggtgaatcgatcctggataactataccggccaggaaagcgggacggcgtttttcggtctgggctcatccgaaatactggccgaggtctatctggaacagggtgaagaacgcggcattataggcgaatttactggctatgaagggatggatgttgcagcatttctcatcggccaccgtgaaccacttgccgccgatggcatcgaacgtgcggctaaagcagcggcggaggctgaggtagcgattgtggttgttggcctggatcaggattcagaaacggagggggaggatcgcaaaactatttctcttccgggcgaacaggacgcattgctgcgcgcggtgattgccgctaaccctcgtaccgtcgttctagttaacgccggcagcgtagttgacctggccgccacagaaggtgccgcagctattgcgcagacctggtatttgggccaagaaactgggaatgcagtagccgcggtcttgacaggcagcgtggatcctagtggtcgtctgccaacgacattcggcaaaaaagtacaagattggtctagccatctaaattacccgggggagtttggtgaagtcttatatggggaagagctgttcatgggttatcgtggttttgaccaacagcagattgaaccagcattttgctttggccacggtctcagctatacctcttttgattggagtggtgctaccctcagtactagtagcctgagtcagacagaactgctggatggggcgcagttctcacttagcgccgaagttaccaacacgggcgatacgagtggctacgaggttctccagtgttatgtgcagcgcgatcagagtcagagtggtcgccctgagcaagaactttgtggatttgtgaaagtgcatcttagcccgggccaaactgccactgttaacattccacttaattttcgttcgtgcgcggtttgggatcaaccgtcgaggtcgtggctggtacaccctggcgaaattaaattccgcctaagtagctcttcgcgtgatacccgttcaacagcggcctttcaggttaccacatga

SEQ ID NO: 406 - DNA, 2457 bp, Artificial Sequence
  6xHis UPI0007968552
atgcatcatcaccaccatcacgagaacctctattttcaaggcagcatgaaccctttccgtaagaaagcccaagagatcgttgcgcaattgtcactggaagaaaaggccaacctgtgtaccggtggtgacttttggcatacccgcggtattgaacaatttggccttgcccccgcgaacttaacagatggcccccacggcttacgtaagcaaaatgatgacgagcaaagcccggacaagggtaagatggtcccggcggtgtgttttcctgctgcgtgctccacggcttctagctttgacgtgtcgctcttggagaagatgggtcaagcaatcggtgaagaggcaaaagcagagggcatcgccgtgttactcggcccgggaattaacattaaacgtactccccttggtggtcgcaattttgagtattttagtgaggacccgttcttaactggccaagttgccgcggggttcgttcgtggggtagagtcctgtaacgtaggcacgtctgtcaagcattttgccgcaaataatcaggaatcttggcgtatggttggagacagcatcgtggatgagcgcgcactccgtgagatctacttgtctgcattcgagactgtggttaaggaaagtaatcctactacactgatgtgttcatataatcaaatcaacggcacgtatgcctcggacaacggctggttaatcagtgacattcttcgcaaggagtggggcttcgaggggacagtaatcacggactggggcgcgacgaatcaacgtatcgaagcaatcttggcaggcttagacttgtcgatgccgggccccgtgccggcatatacgcaggagcttatcgaggcggtaaacgcaggtaaggccccgttagagacgctgaatgagtcagccacgcgtatcgtagagattctgatccgcaatgcacaaaacaaacgctcgacgttcgataaagagaagcaacacaacttggcaggcgagatcgcatcagagtgcgcagtcctgttggagaacgatggtgttttgccgcttcaagctggtaagaagctggcggttcttggtggcttcgcggagaatccccgtttccaaggcggtggcagctctcacatccctaccacgaaagttactagcgtgattaatgctttggatgaggccgggatttcttatacttacagtgaaggatattcctcaaacgaaatcattccagataagaagaagattgagcaagccgtacaaacggcctcacaagcggatgtcgttatcatctgtgcggggttacccaataagttcgaatcggagtcctacgaccgcaaacatctcaatctcccggactcacatctctatttgattgatgaggtaatcaagttaaagaaaccaaccgttgttgtcttaatgcaagggagcccgactttactgccatttcgcaagaaggtcaatagcatcctgctcgccggcctcaccggccaaaacggtggtgcagcaattgtaaatcttctcacggggaaggcgaaccccagcggccgcttggccgaaacctacccacttagcctggagagtgttgttgcgatcgacaattttggtgagcgcgcggttcaataccgtgaatcgatctttatcggctatcgctggttcgacacggctaatattgaggtccagtaccccttcggctacggtttgagttatacgacattctcgtataagaatttacgtgtttccaaaccgattttagaccatgcggacacgatctcagtttatgtagacgtcacgaataccggcaagtacgccgggaaggaagtggttcaagtttacattgagccgcctaagagcgagacgtatcgcgctactcacgaattgaagggattcgagaaagtctttctgaatcctggcgagacaaagaatgtgtgtattaatctcccgcttcgtgctttccaattctttaacaacgcgacccagtcatggtacgccgagccggggaagtacacaatccatatttcacgtacgtctcgtgacccgatcctgtcggcaagcgtcgagatcaaaggcgaacgtcaggtcgtttcggacttccgtcagaaagccccggagtactttacgccgcatctgggcacgaagttctctgagaaatcgtttaaggaaatttacggcaaaccattgccgatcgagatgcccatccgcccgttccaccgcaactctccgattgctgacacccgccaaacgatcctgggaaagttagcgctgaagctcgcggtgagcaaactccgtaactcgtttagcgaaattggatctagtgacgcggatgctgacgaaatccagatgctgcttgactccactattttcggtctgccgttccgcagtttggtcatcttggcaggcggaaagttaacgttcacccaacttgacggcatcatcgatattttcaacggtcacctgctgaaaggccttaagaaacttaagaagtaa

SEQ ID NO: 407 - DNA, 2247 bp, Artificial Sequence
  6xHis UPI0002080410
atgcaccatcatcatcaccatgaaaatctgtacttccagggcagtatgaaaccttcacgcaaatcctttcttctgtcagccgtggcgtggggtctggttgcagcattacctgcacacgcgcgtcacgcagcgaccgctggcgatccggctgatgatcaagcacgtcaagtactggctcacatgtcattgcaagacaagatggccctgttgttttccgtggacggcggtggatttaatggtagcgtggccccgcctggcggtctgggttctgcggcctacctccgagcaccggctggaagcggactcccggatcttcaaatctcggatgcaggactcggcgtccgtaatccggcccatattcgaccgaacggggccgccgtttcactgcctagcggcctcgccaccgcttcaacatgggatgtggatatggccagacaggcgggtgagatgattgggcgcgaagcttggctgtcaggttttaatatccttctgggcggaggagcagacctgacccgtgatccgcgtggtggtcgcaattttgaatacgccggggaagaccctttgcagaccggccgtatggttggctccacgatcgcaggaatccagagccagcacgtgatctccaccttgaaacattacgccatgaatgacctggaaacgtcccgtatgacaatgtcagcagatattgatccggttgccatgcgtgagagcgacctgctgggttttgagattgcgattgaaacaggccacccgggcagcgttatgtgctcttataatcgtgttaacgatctgtatgcctgcgagaatccgtacttacttaatacgactctaaagcaggattggcactatccgggctttgtcatgagcgattggggtgcaacgcattccagcgcacgagcggcgcttgccggcttagaccaagaaagcgcgggggaccacgcagacgcacgcccatactttaccgccctacttgctgccgatgtgaaagcaggccgcgtgccggttgcgcgcattgatgatatggcacaacgtattgtgcgctcgttatttgccgcagggcttgtagcacatccgcctcaaaggggcccattagatgtggtgaccgataccctggtggcacagcgtgacgaagaagagggagcggttctgctgcgtaacgaagggggtatactgcctctgagcccgaccgcccgtatcgcggttattggtggtcatgcggatgcgggtgttatcagcggcggtggtagttcccaagtcgatcccattggcggagaagctgttaaaggtccaggtaaaaaagaatggccgggagatcctgtttatttcccgtctagcccgctcaaagcgatgcgtgcagaagcaccgaatgcccatataacctatgaaagtggcaccaacatcgccgctgccgttcgtgcggcccgtgcggcagatgtagctgtcgtgtacgcaactcagttcactttcgaaggcatggatgcccctagcatgcatctggatgcaaacgctgatgccctgattacagcggtagcagccgctaacccccgtaccgtcgtggttatggaaaccggcgatcccgtgctaatgccttggaattcgtcagtggcaggcgttcttgaagcctggttcccgggttcaggtgggggtccagcaattgcgcgtcttctgttcgggaaagttgcgccgagcggtcaccttactatgacattcccgcaagcggagtcgcagctagcacaccctgatattgcgggcgtgaccgcagacaatgtatttgagatgcagtttaagaccgatcaggagctggtttatgacgagggatcagatgtcggctaccgttggtttgacaggaaccacctcaagccgctttatccttttggctacggcttaacctacacgaccttcagcacggatgggctggccgtgcatcgccatcatgacgcggtgactgtcacctttaccgtccataataccggcaatcgtccaggcgtggatgtcccacaggtatatgtcggcttacccgatggcggtgcccgccgattagcgggttggcaacgtgtgagccttgcccccggtgaaagtcgcgcagttactgttcagctggatcctcgcctgctggcacactttgatggcaaaaaagaccgttggagcatcccttccggcactttccggctttggttgggcacaagcgcaacggatgactcgcagcaggcatcactgcatttatctggtcgaacctttgcaccgtga

SEQ ID NO: 408 - DNA, 2508 bp, Artificial Sequence
  6xHis UPI0008211BFC
atgcatcatcatcatcaccacgaaaacctgtactttcaaggttccatgaacattcgacgatgttttatcattggcatcctcctgtgcggcattggtattctgaatgcccaagttgtcatcacctcggaagccgaacaacgcgcgaaagagatcgttgccaaaatgaccctgaaagaaaagttacgttatatttcaggttacaccggtggtttttcgatttgcccagtcccaaggctaggcctgccggaagtattcatggctgatggtccgcaggggatccgcaacaataccaaatcgaccatgtatccgagcggaatcctgtcggccgcgacatggaatcgggacttgaattatcgtctgggccgcggtttaggtcaggatgcaaaagcccgtggcgtcggtatcctgctgggccctggcgttaatatctatcgttccccgctgtgtggccggaacttcgaatatttcggcgaagatccgtacctttccggtgaggtggccaaacagtatattctgggcgtgcagagcgagggcgtcattgcgactattaaacatttcgcagcgaacaaccaggaatgggaccgacaccatgtgtcttccgaagtggatgaacgtaccttacaggaagtgtacttcgcgccttttcggaaagccgtgaaggaagcacatgttggcgccgtgatgaattcttataacctactgaatggggtgcacgcaagcgagaatcgctggctgaacattgacatccttcgcgatacgtggggctttaaaggtatactgatgagcgattgggtgagtgtctattcgaccgtcggtgctgcgaatcacggtcttgatctcgaaatgccgaccggcgaatatcttaacgaagagctgcttatgccggcgattgaacagggcttaatcaccgaagcgactatcgatctgaaagtccaacatatcctgcagaccctgattgcattcggctttttagataaagagcctaaagatacctcgatcgcacttgataatccgcactcgcgtcagactgcactggacattgcgcgtgagggtatcgttctgcttaagaatgaaggcaatatgctgccgctgaaagggcgcacggtagttatgggtagcaacgctgaggtgctggtaacgggcggtggctccggcttcgtgtcgccatttagcactgtgtcaattgcggaaggcctggagcagctgcagaaacgtaacacgatccgactgaaagacgatcttctgtttgacgaccttaaagatgcaatttacgcggatgaaggtaaacgtcagaaaggattcaaagcagagtacttcaaaaatgttgagctgaagggaaccccggacgcgacctgcatggaaaatcagattgcacatgattggggcaccggggtcccgttagaaggcttcccggcggatggcttctcagttcgttggaccgctacgtatgtgcctgtgactaatggtctggtacgtatgaccatgtgcggtcgtggtggctaccgggcatatattaatgatcaattaatttgtaccgatcatctgcctgagcgcgaacaagtgattgaagtagaggcgggtaagaaataccgcctgcgtgttgaatatcataactatgggggtgatgccaggatcggcctgaaagcgggcattctcaatgaatcactgttaaaacaaaccctggccaaagcgaaaaatgtcgtcctgtgtgtgggcttcaacaacggcgacgaagatggaggcattgaaggcgaaggcgccgatcgtagctttgccctgccgaaacctcgactggaacttattcgcaaagttactagcctgcacgacaatgtggtggtggttgttaacgcggggggtggtattgattttagcgactggggcgataaagttaaggctattgtgatggcgtggtattcgggccaagaagggggtcgcgcagtggcagagattctgacgggagtgatatcgccgtccggcaagctgcctatttcaatcgaacaccgttgggaggataatccagtcagcaagtcctattatgaaaacatgaaatttgcggaatataagcgtacccaatattccgaaggcattttcatgggttatcgtggatatgataaatcgggaatcaaaccgctgtatccgttcggctacggtctgtcctataccacctttgcgtatgggaacctgatggtggaaaaaaacggtgtcaaccgagtgaaagtcacgttcgatatctctaacactggtaaaatggatgcagcggaagttgcacaggtttatgtgcacgatgtgaaaagctctgtgccacgtccgtataaagaacttaaaggctatgaaaaagtgttcctgaaaaaaggtgaaaccaaacgagtgaccattgaattagaggatgatgcgttttcttactacgatatggacaaacaacgcttcgtagttgagaaaggcgactttgaaattttagttggcacaagctcggaatgcttacccttaaaaggaagcatcacgttatga

SEQ ID NO: 409 - DNA, 2481 bp, Artificial Sequence
  6xHis UPI00085A2BD0
atgcatcatcatcaccaccacgaaaatctgtacttccaaggcagcatgactgcagatgaagccgtggaagcggcgttaggtgcgcttgatctggatacgaaagcgaggttgctcgcgggccaggatatgtggactttgcctgccgttcccgcggttggccttgcgtcacttgttatgagcgacggtccggtgggtgtgcgcggcgtgcgttggaccgccgatgatccgtcagtcaccctgccctcgcccactgcgttagcggcttgttgggatccagaattagcccgtcgtgcaggtcgcttgttagcgcaggaagcaaggcgcaaaggggttcatgtggtgctagccccaaccgtgaatttacaccggagcccgctggggggccggcatttcgaagcttatagtgaagatccatacctcaccgctgaaacgggcgcggcatgcgtgcgaggtattcaggacggcggcgtagcggcaacggtgaaacactttgttgccaatgatgcggaaacggatcgctttaccgttgataacaccgtacctccgcgcgcgttacgtgaactgtaccttgcaccattcgaagcgattgtgcgttgtgcgcgtccgtgggccctgatggctgcctataatcaggttaatggcgtaaccatgacggaaaatcgacatttacagaccgaagtgctgcgggatgcctggggcttcgatggtgtggttgtctcagattggttcgccgcgcgctcgaccacgggcgcccttgtcggaggcttagatgttgctatgccgggaccgcacacggtctatggggacgctctggcagcagcagtgcgtgcaggcgatgttgacgaagccctagtggatcggagtgtgcgccgagtactgcgcttggctgctcgtgtaggcgccctagagggcgcggaaccggccgtgccaagccctccggcgcatgtagatggtgaggccttagctagagaaatagcgcaccgctcctttgttctggtacgcaacgaatgcggcgcgttgcctcttgatccagcgagaagccgccgggtggccctggttggcgcagctgcgcgtgatgcgcgtgtattagggggcggaagtgcacatgtctttcccgcccgtacagttagtcccctcgatggactggctgcggcgcttcctgaaggcaccgaattggtacacgcccgcggtgccgacctatcaggtgaaccagcccctgcgggtccgggcttcgcattacgcgcggtgtgtcgagatgctgaagggaccgtactagcggatgtgccgttaccgtcaggccagattcagtggattggtgcggatctcccgggcggcgtgactcacgaagcgctgcacaccgttgaggtcactggaacctatacccctcgcgaaggtggcgcacatggcttcggaacccgtggcgtgggagcgtttacgttgaccgtgggtggtcgagttctttacgacggcactcgcgaagcagagccggctggtgatccatttgaagcatttgccggaaccccagccgaacacggtgcagccgatttagctgaaggcgtgccggtagaggttagcttgcgccatacagttgatcgtgatcgtcctgcgccccttccggctgtggtgtttagtctgcttcaccgtccaccgcgacgcgacccggatgagttaatcgccgaagcagttgaagccgcacggggtgccgatgccgcggtagttgtggtggccacgacggaacgcgtggaaagcgaaggctttgatcgcgcagaccttcgcttgcctggccgtcaggatgatctcgtccgagcggtagcagcggcaaatccgcgtaccgtagtcgtggtaaatgccggtgctccagttgagatgccttggcgcgacgatgtcgctgcggttttactgacgtggttcccgggacaggaaggcggcgcggcactagccgatgtcctgttaggcgccgaagaacctggaggtcgacttcccactacttggccggcagccctggcggacgcaccggttacggcggtcacccctgtggatggcgaattacgctatgaggaaggtccattcatcggctaccgtgcgtgggaccgtgcgccgggaggcccggcgccggcgtatccgtttggtcatggcttaggctacaccacgtgggaatacgagagcctggtggttacccccgcgacagccagagtacgtgtacgtaacaccggtactcgccctggccgcgaagtaattcagctgtatgttgcaccacgcgctgatcttgccgaacgtcctgcgcgctggttagtgggtttcgcatcggtgaccgcaggcccgggtgcacgagcggaagccgaaatccgcttcgccccacgtccttttgatgtgtgggacgaagaagcgggtgcctggactgcagttccgggtcaatatgaaattcgagcgggtcgtagcttgaccgatacccgtctgacagttaccctggaacttgactga

SEQ ID NO: 410 - DNA, 2316 bp, Artificial Sequence
  6xHis UPI00098C60F6
atgcatcatcaccaccaccatgaaaatctctatttccagggcagtatggagtattctaaaaaacacgtacgcaaaggcgatactatgcgcaaacgcgcgtataagattctcggactgatcaccattatgagcctggttctgccggtgaagtttagctacgctaaaatgaaggcaagcaatgtggtcaccctgactgacgaggcttcaattccaactgtgatctccgaaatgaccttggacgagaaatgccagatggtgtgtgggattggtttgatgaccccttatggaggcgcgggttcgacttttggtattgaccgactgggaattccggcggtagagctgaccgatggcccacagggtattaggatgggcggcctgaccattaccccgaactacgcccctaaaaagtatgcgacgtgctttccgaacccattgctcaatggtagcacctggtcaacggagctgatgcgtcagattggcgacgtcatggcaaaagaaggccgcgattacggggccgatgttattctgagcccggcgatgaacattgtacgagacccgttaggtggtcgtacctttgaatactactcagaggatccgtatctgattggtaagctgtccaccgaagaagtcaaaggcatccagggagaaggtgtgggcgcctgtattaaacacttcgccggtaacaaccaggagaataaccgcattgatggcgacgaaattatatccgaacgtgccctgcgcgagatctatctgccgcaatatgagaccaccgttaaaaacgccacgccttggaccgcaatggcagcctataacaaggtaaacggcactcgcatgaccgaaaatagttaccttctgaacaacgtcctgagagatcagtttggattcaacggtatggtcatgtcggattggggtgcatacaatcgcgccgaagcattcaaaaatggcctggacttaaatgaaccgggcggcttttataatatggcgggcattatcatgcctgcatggctgctgcagattaaacctgcagtgacgtcctggggcgctatcaaggaaagcgatctcgaccgcgccattaaaaacatcctaaaactggtgattaagaccccgacctttaaaggcgaatacggagacaaaaagcaatttctaaagaagaccaaacttacgcagaacttgcaggtcgaaggtgatgtcgtgtcacgcaatttagcggaagaaggcattgttttgctgaaaaacgataataacacgctcccccttaaatccggaaacaaagtgctggtggcggggaaaaacgcattctccggtagtggtatcatttacgaaggtaatggatctgccaccgtaaatgccgacagcaacgatgttacctcactggttgatggcatcaagaacgccggctttaacgttaccaccaaggtgaacggcaataatattgaggaaggcgtgagtaatgaagtcgcgattgcctcagcaaccaatttagatgccgtgattatttccatcggcctgcctggtcatgaagggagcgattactcgagcatgaatctgtctgatgaacaagagaatctcatcaaaaccctgggtcaggcgtatcacgccgtgaacaaaaaggtgatcgtcctgttgaataccggcgcaccggttgaaacggcgtcctggtcgcaatacgcggattcaattctatgggtgggcttgcccggcaacaaaggtgccgaagcgatagggaacatcattaacggcagtgtaaacccgagcggcaagctcacagttacgtggccggtcaaatactccgatgtaccggatagctcgtattttccgaaagatacaaaaaccccggtgaattataaagaggggatctatgtcgggtatcgctattatgatagtaagaatgtaatcccgcagtaccgcttcgggtatggcctatcctacacgaattttaaatatagcaacattaaactgtcgtcagataaattcgatttgaaagatgacaattccgtaattaatgttaccgcagatattaccaacaccggttccgtaaaaggtaaagaggtggcgcagctgtatctgaaagcgagctccaatgttgtggatcgccctgacaaagagcttaaaggcttcgcgaaaactaaactgctaaacccgggagaaacggaaacggttcagttctcgattgataagcgttcactcagttatttcaacgaaaccacgtcaagttggacggccgaacctggccagtttacggcaattgtgggcggcacttccgatgacaacatactgcagacatcgggcttacaggatacatttaatgctaactga

SEQ ID NO: 411 - DNA, 1431 bp, Artificial Sequence
  6xHis UPI0009CE0D4C
atgcatcaccatcatcatcacgaaaacctgtactttcaagggagcatgaattcggacaaaaatgacaaaattctcaagtttcctgagggcttcctgtggggtgccgcgacctcccattttcaggtcgagggtcacccgaaagaaatcggtggttccttaagtgattggtcacagtggaccaaagttgaaggtaagatttttgataaaagccacgcagacgatgcctgccagttttatcatcgcttcgaggaagatctgtctctgatcaaagatctaaatctgagtgcctttcgcatcagcctgaactggccggcgctggttaaagaagatggctcgctcgacgagggagaggttgattactataaacgcgtactgacgggtctgaaggaaaacggcatcaagaccttcgtgactttattccacttctgcttaccggaaaaattgtctatgagtggcggttggcagaacgaagaaaccgcagtttcttttggcaaattcagcgggatcgtggccaaacgcttagaaggcttagtagactattggttgactattaacgaacccctggcctacgtgtaccagggcttcatttctggtcattggccgccgggtggcaaccgtgattatgtggctgcgtttactgcactgcgtaatttcctggtgggacattcgctgagttacgatgcgatcaaggaacatagcaacaagccggtgtcatacaccctgcattggcgcccgttctatcctaaaaataggtttagcccactggatcacatggtgcgctactatcgtgaccagatttttaatcatctgttcccgcggtcagtagagagcggtattctaaaatttccgtggccggtatcttcaggtgtaattaaaagcatcgaaggtgagattaaaggcctgaaaggaaaatgcgattacctggccataaattattatacccgcgaactgtcccgctttaaaccggcatggccgctggatctttttggcgaatcgtcgccagaaaacgaactcgctgtgagtgatatgggctgggaaatttacccggagggcctgtacgatttattggtccggcaaacactgccctaccagaccactccgagcggtgcaaaacgcccggtagttattaccgaaaatggatttgcaaacatgtatccgccggagctttcagaaggcgactggagccttaaagacgagcagcgcgtgaactatctgatacgtcacctcgaacagttgtaccgcgcaattcgtggaggcgtggatgtgcgtggttatttatactggtccctgctcgataacttcgaatgggccgaaggtttaagcgctcgttttggcttagttcgagtgagctatccgacccaggaacgtttattgcgtgcctctgcacgcgtatatcaagaaattgcccggaataacgccatccagctttga

SEQ ID NO: 412 - DNA, 2202 bp, Artificial Sequence
  6xHis UPI0009D4127D
atgcaccatcatcatcaccatgagaacttgtatttccagggtagcatggaccgctacaatttagaacgtcgaattcgcgccgaaaaatgggcggagggcaaactagcacagatgaacctggatgaaaaactgcatcaactcgctgcaagctttccgaatggtaacgagcgcctgtcaattccgcacatgcagcaaggtgaatgtctgcatggggcagtgactccgtacgccacctcgtttccgcaagcgctggctttaggcagcacatgggatacgctgctgatagaacaggtggcgaccgtaattgcaaaggaatgccgcgcctgtggtattcaccactgctatgggccgatggtggccgtagtacgcgaccctcgttggggtcgtattcaggaagcatatggcgaagacccatatcatgtctcacgtatcggcttagccttctctcttgggttgcagggcaccggagataaatatctggacaaggaccatatagtggccacggcaaaacattttgtcgcggatggtgaaccgcttggaggtctgaatggtgcagcgatggaaatttcggaacgtagccttcgtgaagtgcatttactgccgtttgaaaccctggtgaaagagggtcatgtctgctccgtgatgcctgcccatcactccctgaacggcgtaccgtgtcatgcgtcacgctatctgctgcagaacattttacgcgaagaatatggattcgatggaattgttgtgtccgataatggggacatccgcaaactccacaccgcgctgtttgtgagcgactctccagaaacctcggcggttatggccatgaatgcgggagtggatacggaactcgcgtggatgatcccctggaatgaaaaccgtttgtacggtcccgtgctgaagagcgctgtggaaaagggacgcattagcgaagaaattgttaataaaagcgttatgcgtgtcctgattaaaaaatacgaactgggcctgattgacgacccgacggccgatccaaaacaggaatcactggagaagtgttacatgggtaccagcggtactgatcatgtgtcgatggcgggtaagaccctttattttgggaaatctcgtccggatcgcaaacaagtctgctacaataaggaccacgatctgctggcgctgaaagcggccttcaaatcgattatcttgctggagaacaaaaataacctgctccccctcaataaaaactcaattaaccgcatggcagttattggccctaatgcgaatcgcttattgctgggcaattatagcaccgacaaaccgaaatactttgtgagtgtgctcgatggcattaaaaactacgcagagggtaacttcgaaatcacctacagccaggccctggaccaggatgattatggtaaaattaatattgcgcacgcggtgaaaaaagccaaggaagcggatattacactccttgtgttaggtggcaacgagattacctgtatggaaaacgaagataccgatgatttaagcctgaaaggagatcaacagctgctgttcgagcgtgtgcgtaaagtagcgaaaaaactgattttactgatcattgatggacgcccgagttcagttatctgggcgaaagaagagagcgatgcgtttctcctggcgttctatttaggccaagagtgcggcaacgcggtagccatgacgatttttggccagaataacccgtctgcgaaacttccggtgacaattccgaggaatgtgggccagattcagtgtcattacaatcgcttctatcctggccgtgctccctcctactacaagagctccgttgaaccattgtatccgttcggctacggtctgagctacaccgactttgatattagcgcccctattatcgagacccaagaaaaccagaaatataccgtcaatgatgaaattccggttcttgtgaccgtaaagaacacgggatatgtgaaaggtgaggaaaccgttcaattatatattaaggattgcatcgcctcgctggttcggcccgttctggaactgaaacgcttccgtaaagttgagttagagccgggcgaagagaaaacgatcagatttaatctgaagcctcgtgacttcgcattctggaaagacaaaaagtggatcaccgaacctggcaaatttattattatggccgggaattcgagcatcaagtataaagagacggaactgtaccttgagtga

SEQ ID NO: 413 - DNA, 2724 bp, Artificial Sequence
  6xHis UPI00045601AB
atgcaccaccaccaccatcatgaaaatctgtactttcagggtagcatgtctccgggcatcgattttgatcgccctcacgatgatgatttggacgcgcggattgaagcgcagttgagccagctgtctacaaccgaaaagattcagctgacgtccggagatgatttctggcgtactcatgccgttccgtctcgcggcattccttgcttgaagctgtcggatggtcctagcggcgcccgaggtggggggtcgtttagcgatcctacgcctgcagctctgtttccctctagcagttgcctgggcgcaacctttgaccgttccttagcgtatcgtatgggaaacgcgatagcctgcgattcgaagagcaaacaggttcacttgctgctgggcccgaccattaacatggttcgcgacccgcgcaatggacgctcgttcgaaacgtactctgaagatccactgctttgtggcgcattaggcggtgaatatgtgctgggtgttcaggacacaggcgttggcgcgtgcctgaaacactttgtagcaaatgaggccgaacaccgtcgacgcgtaaactcgtcgaacgtggacgagacgaccttacgcaccgtatatctgcgcccgttccaaattgcgttagcgcgcattcgtgaggcacatcgtaaaggtgaagatggcgcccaagcccgccctttccgcggctctgttgctagcattatgacggcgtacaatcgactgaaccgtgtatcgtgctcggaaaatgattggctctataatcgcattctgcgcgacgaatggagattcggcggccttgtggtatcggattggctggccctgcataaccacggtcttaaagttacggacttggagatgccgggcccttctattcatcgcaaggtagacagggtgctccaactgatcaaagacggcgtggtgaccgaagttgatattgaccgccgtgccgcggccgtgttgcgcctgatccaacaggtggccccactgggctttcgtacgttagccgaagagagcgaaacgagcccggaaatacaggaaaccgccgatgtgattcgtcaaattgctgcagaaggtgccgttttactgcgcaattctgccggtttattgcccctggatccgatgactccgccgcgtcgcatcgcactgattggtcgcgccgtgacgcagccgatccaatctggcggcgggtcggcgaatttaaaaccccaacatgtgagcagccttcactctgccgtaaccgcgttactgggggaccgctcggaggttgcggtcgcgcagggttgcgaaacgtggtccttcgcaccgccattaccgaccgatctggtgagcggtatcgaatttgagtggtatagccgagattcggagtcaggcaagcgcgaactgcgtggtcgtacccagccggactcgttacgttgggacgcgtctctgaacggcctgccaccgctggcgcgcgaaggcaaactggacgctaaaacctggagcattacggcgtcctttgatttacaaagcgatcgtgatatggattacgtgttgcagtaccatgcatttgggcgtctgactatcgcgaccggcaaagccccattggtcttcgaaggagaaaaagatccgtttgaatacctgttgcaccctcatcattatcgcatcgaacgtcgcttacacctggaagcgggccgtaggcagcgcatcactttcgattacgaaccagttcgaggccttggtgcgtgggaaaaacgctttttcagcagtttcggagtaggcggctatgaagttcgtgacccgaaattagacatacaagaagcggcgtcggtggccgcgagttcagatttggcggttgtcctggtatctacgggccctgaatgggaatcggaggggtttgatagggaaaccttatgtctgccgcggggtcagaatgagatggtacgtgcggtactggaagcacagccaaataccgtagtcgttactgtaagcggagctgcgattgaattacccttcttagaccatagcaccgttgtgcacggttggtttgggggacaggaatcgggttccgcgctgtgcgatgttctgtttggtcaaggttttgcccccgcatctggtcgtatgcctcatacctgggcgaaaagtctggaagacatcccggcagcatcactgggtccccgtggtttcccgggcattatggaagatgacgatgacgttggtcccaacacttattacgatgaagccctgagcatgggctatcgccattttgaaacccgtagtgtgcggccgacagtatggtttggtggcggactggccggttacacccgttttacctcttcaatgcgcgtgcgtggtggagtatcgcgttcgagtaatgcagttgcggaggtgaccgtgcgtaatgtaggtcagcggtcgggcaaagaggttgtacagatctacctggccgatgcgttcggtgcgggtacgggtcgctctttggtcgcatttgatgcagtccgcttggcagccgggaaggaagcccgcgtggagctgcccattagagcggaaatgctgagtcgttggtgccaggatgcaggacgctggaaagtgcgcaaaggctggtatgatctcgtgcttgcaaaaagcgcggaccctgcggatgaagtgcagcgagcccaggtggaggtccaagaagattgggattggcgtggcctagaagcgagtgaggaaattgatgatctgcccgccccgaaaatctga

SEQ ID NO: 414 - DNA, 1257 bp, Artificial Sequence
  6xHis UPI0004FF77C7
atgcatcaccatcaccaccatgaaaatctgtacttccagggcagcatgatgcgctttccgcatggtgggggcagctctggtacggcacaggccggcggcctaaatgcaccggaacctattcgcggagtgaacctgggcaactggttagttctcgaaaaatggatggaaccgtcgctgttcgaagggtaccgtgccgaggatgaagacaccttggcaacggttgccccgaaagatcagctcgcccaacggatccgacatcatcgcgatacttatatcacggaacgcgatttccgagaaattgcggcctgcggtatgaatctggtgcgcctgccagtcccgtacactgtttttgaatctgaaccgccgttaggaggtgcctggcgctacgtcgataaagcgatggcatgggctcgcacctatcatcttcgcgttctgttagatctccacaccgcgcctggtggtcagaacggcttcgattcatctggcttaattggtgcggtgacctggcataagaagccgcagaatgtggaaaaagcaatcactgtgctggagggtctggcgcatcgttacggccatgacccggccctgtttggaattgaagtgatcaacgaaccggtgagttggcccgtgttttttagtaaccggaaaaaactagtggcacgtaatccgaaagacaaacgttattcaagctacgtcccgatgtcttttctacgtcagtactaccgcgcaacctacaaacgcctgcgtcgctatcttccggacgataaggccattgtcttccatgacggctttcgatttggcctgtggcgcgatttttttaaacgtaaccagatgaccaatgtgtatgtggacgcccacgtgtacttatccgcagcggaacgtatcgttcaagtgcattcaccgtgggcctatcgactgtttctgcgttggcagcgtcgtcgcatccgctcaatgcaacgtgtggtccctgttcttgtgggagaatggtgcgtggaaaatgaatgggccaaaaacttagatccgggcgaaatggatctggatcagtttgacgacgcgcagcgccgccgatttgcgcatgtaactcgcatgcagctggattgtttcggtcaagcggcgggttggatgtactggagctggaaactggaaccaagcagccatacggccccggatgctctttggaaagagtgttgggattttcgtcgttgcctgatgcatgggtggttacctgacattgcagcccaggacgatggtcgctga

SEQ ID NO: 415 - DNA, 2310 bp, Artificial Sequence
  6xHis UPI00051EDBDE
atgcaccatcatcatcatcacgaaaacctgtattttcagggaagtatgcgtaaactgtttctgctgtgcctgctcattagcattgccatcaccagctgtaatgaagaggtgagtaaggattacaaggatgcgtctctttccattgatgaacgcgtggaagcgctactaccgaaactgagtctggaagagaaagttgcacagatgcgcatttttcatgccaacattggagtcaaacatgacgaaaacggcaaattgaaactcagtgacaaggtggtcgagaaactgaaacttggcattgcgggtattaaaaacccaggcgaacacatagacgcggtagctgcggcgaaacttaacaacgagctgcagaagtatattatcgaaaacaaccgttggggtatcccggcgctgtttgttaccgagagctataacggtgtggatgcggaaggttgcaccaaattcgggagaccgatgacaagcgcagccagcttcaatccggaattggtcaaacgccaatgggacgtggtcggtcgtgaggcccgtctacgcggcatgcacatgtgtcacagccctgaagcagatattgtgcgggacccgcgtttcggacgcatgtcagaagccttcggcgaagatacatacctgactacgcagatggtgaaaaacgcgattatcggagttcaaggcaactacgaaggtctgggtaacggcacacacatcggtgcagttgctaaacacttcgcgggttatggccaagtgctgggcggaagcaattttgcagccatcgaaattagtccaaggacgctgatcgatgagatttatccgccgtttgaggcggcggtaaaggaagcgaaaaccctcgggattatggcttcgcatggcgatttaaatggcgtcgcaagccacggcaatcctgagttactgactggcgttcttcgcgaccagtggggttttgagggatatgttgtcagcgattcaaacgatattgcccgcctcttttactttatgaatgttgccgaaagtccggaagcagccgcgcaaatgggccttgaagccggcattgatattgacctttatgcggaagactcctacgcctacctgccggagatggttaaaaagaacccggagctggaaaaactgatcgatcgcagcgttcgccgtgtgctccgcacgaagtttattctgggactttttgataacccatacattaacattgaggacgtagaaaaagggaaccgcgctgcgtcatctctggaacttgctaaagagtcggacctagagagcatcattctgcttaaaaatgaggataaagccctgcctttatctaaagaaaagagtctgaaagtggccctgttgggcccgctgctgaaagataacactcaggaaatgttcgaaagtgttgccggaagtaatgtcaagtttattagcgagaaaggcttccagctgaccaaccagaagggtggcgcgccgaaactcctggatagggatcccaaagccattgcctcgctcgtgaacaaagcgaggtctgcggatgtgagcatcttattcctcggaggggacgaatatacctcgaaagaagcgtacttttctaatagcaccttaggggatcgcgcgacgattgatcctgtgggtccgcaggacgaattggtggaaaagattaaagcgttgggtaaacccgtcatagtcgtgttaaaacaccgtcgcaccctaagcattaacgtgattgcggaacaggcagatgccattctggacgtatgggacttgagtgagtttggcgacgagagtaccgccaaaattatcttcggagaagtgtcaccgagcggcaaatcgccggtgaccataccgcgttccatcggccaaattccgtttcactatagtatgaaagagattaactacaaaaaagagtatctgttcctcgaacaagggccgctgtacccgtttggccatggtctgtcttacggtgactttgaatacagcgacatcagtattagcaatgcagaaatcacccctgagacggatctggaagtgagcgtcaaagtgactaataacggtaacgtgaaagccaaagaagtagtccagatgtatattaaagatgagatcggcagcgtcacccggccggacaaagaactgaaaggttttgaaaaaatcgaactggacgcgggagagagtaaaacggtgtcatttaagatcacacccaaaatgctggaatttaccggcatcaacatggaaaaagtgctggaggcaggcgattacacagtgatggtgggaacgtcgagcaataaatatctcgaaaccacctttaaactccagaaatga

SEQ ID NO: 416 - DNA, 1848 bp, Artificial Sequence
  6xHis UPI00062105AB
atgcatcatcaccaccatcacgaaaatctctattttcaaggaagcatgctcggtgttccgcctaaacagccggcactagacagtcaagttgacatcctgctgacgaagcaggaagccacccctgcggtagttagcaccgaaatttcagccgtacagaaacgccgtcgcatatcactgattgttattggcactatctttggcgtcctggcgtctcaaaatattatcggtggcagcaagaatagcaataagagcgcggaattagcggaaaacgccgatgcgcgtgcgactggtacgtcaagccaggtaaccgccacctccggccagagcagtgcgagtgcaacgagcaccgcctccgatgaggacgaggaagacgatagcaacaactctgaaggtaattcgactagctgtagccgtatacgaaacattccgaaggacgttgttggaacgtatctggatatgaccaaatggatggacactactgattttaactgtacttggaccgatgcaaccgttggaaacctttctctggcgggactcaatagtacgtggtcagacaacacccgcgcgaacgaccgagtgccgccgttgaatacatcgtggggcagctatatggatcgccctatccgcggcgttaatgtaggaggttggcttaacctggagccgtttatgacgccgagcctcttcgattactccaccgacctgggcattaatgatgaatacacgctgttgaaacatttgggcccggaaaaaggccgtgaagtcctggagcagcattattccacctttattacggaagatgactttgcggccatcgcagctgccggtctggatcatgtgcgcattccgttcagctactgggctgttgccacctatgaaggcgacccttacattaaaggtgtgtcatggcgctatcttctccgcggcattgagtgggcgcgtaaacatggattacgagtaaaactggatctgcacggcttaccgggcagtcaaaatgggtggaaccatagcgggcgtgcaggtaatatcacctggctgctgaatggcactgaatcagcgatgctgaaccgtaaacgtagtctggacattcacaaacagcttagcgctttcttcgcgcaggaacgttatcgaaacgtggtggcgttctatggtctagtgaacgaacccggggctagcatcccaacggatgatctggtgagctggaccaaagaagcctataacattgtgtctggggcgggatataccggcacacaggtatatagcgacggtattcgtgacgtgaactcctggtctgggttatttgagggctacggtgactccctgagtattgatacccatatctatatcatttttacccagcctctgctgaacaaaacacgtgctgaaaaagtagatttcgcctgtacgaagtggacggaggatcgcgatgaaaacattgccaaagtcggaccgactatggttggcgaatggtcagttgccgataatgattgcaccaaatatcttaatggcgcaaatgcgggtgcgcgttgggacggctcttttgaaacaaataatggtatgtcttggtgtcccacccaggatgaccgttgtacctgtgagcactcactgggcagcccgaaagactattctgattcatataaaagtttcctgtatacattcgcaacggcacagatggaggcttatgaacacagctggggctggttttattggtcgtggaagactgaaaacgcgcctttgtttagctatcaggcgggtatagagtatggctttttgccgaaactggcctatgagcgcatctgggactgcacgaagccggtgcctgattttggtgaatggccggaatatcagtga

SEQ ID NO: 417 - DNA, 2523 bp, Artificial Sequence
  6xHis UPI0006583AB1
atgcaccatcatcaccaccacgaaaatctctatttccagggctccatgagtgcggacaatgatgaggatcgtactactcaagtggtgccaagctctgctgcctatcgtgacgcatccctcgcaatcgagacacgcgtggacgatcttatcacctggatgaccctatccgaaaaactcgcgcagctcggcggagtctggtctacggaattactgggtacagatggtttttctgatgagaacgcggctcgtctgatgcctgatggaaccggccagatcacccgaatcgcggcgagcaccggtttacgcccggaaggtattgccgccctgcacaaccggattcaggaatggctaacttcgcagacccgcttgggcatcccagccgttgttcacgaagaagcagtcgccggcttttgcgcacgtgatgcggttcagtttcctcaggcaatcggcctcggcgctacctgggatccggaactcgtaggtcagatcgccactcacattcgtggcgaaatgttagcggtgggcgcacgccaggcattagcgcctgtactggatattgcacgagatcccagatggggccgcgtggaagaaacctatggcgaggatcctattctgactgccgcactcggggttgcctatgtacgtggactccaagcggacgccgatgacgcggttggcggcaccactcgcacccatttacatcagggtgttatcgctaccgccaaacactttctgggctatggcctttcagatggaggtctgaatcatggaccagtgcagctgggcgagagggaactgcgcgaagtattcgcggaaccgtttgcagcggtaatccgagaggcccacattgccagcattatgaattcctacgcgtcagtggatgggcttgcgccggcaggtagccgtgcgctgctgaccgaactcctgcgcgatcagttggctttctcaggaagtgtcgtggctgattattttagtgttgatatgctggtcactcatcacaaagtggcacctaccaaaggtgtcgccgcagcgaaagcgttgttagcgggcctggatcaggaattgccgacactggactgttacgcacagttgccgtcgttgatccgtgcgggcatcgtcccggaagcggtgctggatcttagcttgcgacgtgtactgcgtcaaaaattcgccttaggcctgtttgagcagcctcttgtcgatgagagtacagccgccgctgcttttggcacggctgtaggtcgcagtctggcgcgtaccgccgcccagaaaagcctggtcctgttgaccaacgatggaattattccgctgaatcccgccattctgtcgagtattgcagttattggtccggcagcggataaccctcgtttattagaaggtgattatcattacccggcacatttggaactcctctttgatagtgcggagaatgcgaccgatagcacagccgaaaaaaccgcggaaaacaccgcaggctccgaacttgctccgcatgccgccgtgagtgcgacaggcgactttgcaccgggtccttatttgccggaaattaccaccccgctccgtgggcttcagaacgccttatcagcgattgatgtgcaggtgcagtttgcaagcggttgcgatataacgggtgaagatcgcagtggatttgatgctgccgtggctcttgcggcatcctccgacgtagccattgtttacgtaggtggacgtagcggtctgacccttgatgcaacggttggtgaagcgcgcgatgcaacggatcttggtttgaccggtatgcaactgcagctgttggaagcagtgcacgcgactggcactcccactattgcggtagtcatttcaggacgagtgcataccctggccgccgtagaatctgcctcgtctgcgaccttgcttgcctggctgcctggttgtgaaggtggcagcgcgattgcagatgttttacttggtaccgttgcgccctcgggaagactgcctgtgagcctgccacgcagcgttggccaggtaccggtacactataatcatcgttctgggggtggcaaatctaacttttggggagaatacactgactccccgaccacggcgcttcatccgtttggattcggactaagtacgtctagcttcagttacagcgacccggtttttagcgagggctctaccacagagagcaccgtagtgcaagtaacggtaacgaatacgggccgtttagacgcggaagaggttgtccaatgttacgtgcacgatgaggtggcaagtgtggctcgtccggttcgtcagttagtgggctttgcacgtctgacgattgctgcgggtcaggcgcgtagccttcgcttcgtcattcaccccagccgcttagcgttttatgatgaacagatggactttgtctgtgaaccaggcgctttccgcatcgaactaggaggatgtgcgggacatcctgagctggttacgacatgtgatctgtcgggcgacgtggtgcgttacaaacaaagccaggtaattgccactgtggtggaactcatttga

SEQ ID NO: 418 - DNA, 2178 bp, Artificial Sequence
  6xHis UPI0007AABFAD
atgcaccatcatcatcatcacgagaatttatactttcagggaagcatgggtcgtcatggccatagcagagaacgagctgtagaactggcgagtcaattggagttaagggagaaagttggcctggtcagcgttgcgatgactattggagacgatgcacctcgcgacgcgctaggttcggccgcctattgtccgggcgtgccgcgcttaggtattcctgcgtgggatgaatccgacgcctctcttggcgttaccaacccaaatcaggttcgtggcgaggaaccggcaactgcattcccaagcttaagcgcactgggcgcgacctttgatagggatttagccgaagaaatgggccgagcgctgggtgaagaaagccgtcagaaaggtttctccgtgcaattagcaggcggggttaaccttgtgcgcgagccgcgaggcggtcgaatttttgaatatatcggcgaagatccgctgctctcgggagtcttggcaggagcgcaaaccgctggtatacaggcggaaggcgtagttagtaccctgaaacattttgcgttaaacccgcaggaaaccggtcgcgtgatggtcagctcaactataactgaacaggcgctgcgcgagagtgacttgctcgcgttcgaaattgccttggaaattggaggcgctatggcagtgatgccgggctataacatggtcaatggtaagtatgcgagcgaaaatcactttctccttaccgaagttctgaaaggtgattggcgtttcccaggttttgtgatgtcggattggggggcaacccatagtacggtgcatgcagcgatggcgggcttagatcgccagtcaggacgtgatttagacacggaacactttttcggcgatgcactgatgcagtctgtgcagcgcggagacgtgccggtcagtcgcctcgatgatatggtgttacgcattcttacagcgttagatagcgttggtgccctgagtgaacgtcgtcgcccgggtcccgtcagctttgcgaatcatgcaacagtttctcgcagggtcgcagaagcgagcattgtgctgctggccaatgattcgtgcgctcttcctctggatccgctgggcggccgtattgctattgtgggccacagcgcacatattggtgtgctagcaggtggtggctcgaccacagtcacccccccgggatcagatctggcgcagggtcttagtatcccacagatggatctcccacgtgtgcatcatgccccggccccgttaaccaccattactgcagcctttccggatagagaggtggttcacgtgtccccggaggaactccatttgctgggcgatgacgatgtcgcggtggttatcgtagagaaatggagcagcgaaggagcagattggcctgatctgagcttaggggatggacaggatgacgttatcaccaccacagcggcacacgccggtacaaccgttgtcgtgcttgagaccgcgggcccggtattaatgccgtggattgattccgtagatgcggtgttggcggcgtggtatggtggggatcacggtgccgacgcgatggcacgtgtcttgagtggggatgtgtgtccgggtggtagggttactgtgacctggccacatgcggaatgtgatcttccgcgcccgcgaatgacggacccgtcgacaactacttcattcccaggcgcaccgcgtaaaggtgggtacttcggcgtggactatgatattgaaggggcagatgtgggctatcgttggtacgaacgcgaacgcctgagccctcagttttggtttgggcatggcctgtcttataccacgtttgattaccgtgatatttcagtcgagattggggctggtggcctgccagttgtgagtctgacgatagaaaatacgggcgatcgcgcgggcgtagaaacgccgcaggtttatatcgccccgccggctggccagggccaggatacttttcggttagccgcgtttcatcgcgtacgtctgcatgctggagaagccagcgccgtacaacttgttcttaccgaggaacgcgtttattcgagctatgatccggatggcagccgttggacgcgtgcggccggcgattacttagtacgtattggtcgtcgggccgggcatactgaatttgaagcctgcctgcgcctgacctctcgtacctggggatatgcggatgcaaactga

SEQ ID NO: 419 - DNA, 2007 bp, Artificial Sequence
  6xHis UPI0007F2D02D
atgcaccaccaccatcaccatgagaatctgtacttccagggcagcatgagtcaggaagatcgcattgaagcattactgcgcgccctgaccttggaagagaagtgcttcttagtggcgggcaaaaatatgtgggaaacgtgcgatgtcgaccgcctgggcatccgctctctgaaaaccaccgacggccccgctggtgttcgcggtgcgacatggattgatgggactcatacaacctttatcccgtgtggcatttcgttagccgcaacattcgaccctgcgctgattgaacgcgtaggcgatatcttaggtgctgaaacccgctctaagaacagcaacgtgctgctggcaccgaccatgaacatttcccgttcccctctgggaggcagaaactttgaaaacttcggcgaggatccgtacctgagcgggattatggccaccagctacattaagggcgtacagaaacatggcgtgggtgcttgcatgaaacactacgtcgccaacgatatggagacacgtcgctttaacatgaatcagcagattgatgaacgcacactgcgcgaaatttacttaaaaccctttcaaatgaccctggcagcgcagccgtggactgcgatggcggcatatccaaaaatcaacggacaccacgcggattgcagcaccttcctgctacaagacatcctgaaaaaagaatggggcttcgatggcttggttatgagcgactggggcggaacgaatgataccgttgagagcatcctggctggcacggaccttgaaatgcctggcccgcctattcgatatggcaaagccttagtggaagcagtgaaagctggaaaagtgagcgagaaggatcatttaaacgcgagcgtgatgcgtttgcttcgtctcctggaaagagcgggcttattagatccggaacgtaaacaagctgatcaggaattagacagcgaccttccagaatttcgtcagaccgcacgcgaagcggcaagtggtggcattgtcctactgaaaaatagcggcattttaccgctgatgccgcagaaaattaaaaaactggcaatcatcggcccgaatgcgaaaacgccgaccacaggaggaaccggatcagccgcactgagaattgacgagcaagcattatttgatgaagccgttgccgtagcgaccgaagcggaaattgtggttctggttgtaggtcacaataacgatacggaaaaggaaggaattgatcgtacctctctgagcttaccgcgccgtaccaacgaattggtcgaggccatttgccgtgcgaacgctaacacagtagttgtcactcagtccgcgagtgcgatcgctatgccgtgggccggcgcaccgccagccattgtgcatgcgtggtaccaaggccaagaaaatgggaacgctctggcagatgtgttattaggccacgtgagcccgagcgggaagctgcctgtgacattccctagccgcttagaggaccacggcagccactcgtggtttcctggcgatgcagagcgtgattatgcggaatatggcgaaggcgtactggttggttatcgctggtttgatgctaagaacattcaaccactgtggacgtttggatttggcctgagctacaccgcgtttcgtgtgacggacgccaaagtctcaggcacgattaatctggacggctcggccaaagccattatttcggccaccgtcaccaacactggcgcccatgatggtgcggaagtggttcaagtgtatgtggcgccttccccagtgattgcgcagaaaggccgcgatgctccgccgcgttcgctcgttggtttttataaagtatttgtgcgcaagggcaagagcgaactggtgcgtattagcctggatgtgtcggcggtgtcttggttcgatgtagaagccaaaggaggtcctagcagttcaggccgctggcgtgcggatgatggtaaatacaaatgctttctgggcacttcctcacgcgatattgtggcggaggttgaagttgtggtcgaatga

SEQ ID NO: 420 - DNA, 2571 bp, Artificial Sequence
  6xHis UPI000821004D
atgcaccatcaccatcatcatgaaaatctgtattttcaggggagcatgaacattaagaagctcctaatcatttcgatttccgctatcagcatcaacacttacgcgcagtcctccatcgaggagaaagtagccacgctggaaaagcagttaacgactaaggaaaagattgatctcctgtgcgcgaaagcaccgaagattgcacacgccaacattacgcgatatgattggtggagcgaatgtttgcacggagtggcacgtgcgggtaaagcaactgtgttcccaaaaccgatcggcctgggttcaacctgggatgttgacctgattaagcgtattagcaccgcgatttcagatgaagcgcgcgcgaaataccataaagccctgcgcaataaaggctactcagaccgacatgaagggctgacctttttttctccaacccttaacattgcgcgtgatccgcgttggggccgcacctcagagtgctttagtgaagacccgtatctcacctcgcagctaggagttgcgttcatccaagggctccagggagaagatccgacttatctgaagacggtggctacggcaaaacattttgtagcgaacaacgaagaaaaccgtcggctgggtggatcggcaaccgtagatgatatgtcactgcgggaatattactttccggcgtttcaggctgccattaccactgcaaaagcagcatcagtgatgggcgcgtacaatgccttaaatggaatcccctgctgtgcaaactcctatctgctgactgatatccttcgtaaagaatggggtttcaaaggtgtcgtcattagcgatggtagtgcgatcgataaactgtatacacaccacaagtacgctaagaccctggaagaagcggcggcgttggctctgaaggcgggatgtgacatgagcctgcgcgacgaatatcgagaaggcctccgtaaagcttatgaaaagcgcctgatcaataccggggacattgacaaagcactgaagcgtgtgcttactttgcgttttcgcctcggtatgaatgacccgtcaggcaagaatccatacacccacattcctgacagcgtggtggaatgcagccagcatcgtcagctggcactggaggcgagccagaaatcgattattttactgaagaacgataagattctgccgctgaaattgaacaaccagaagatcaaaaagatcggtcttatcggcgaagcgttcaccagcgtctattacggtgattacagcggcaccccagaacataatactacgctgcttgaatgcattaccgcagaagttggccaaaaagcggaagtgacgtggatcaacgaacaggtgaatgatgagatcatcccgagtaactacctgactcgcagcgagaaagaagcgtatgatggcatcctaggctttactggcgagtattttaacaatagtaaactgaccggtgagccggatctgcggcgccaagatctaagtctgtcgttcatccctagcaaagacaaacagctgaaagattaccagcagttatctgcacgctggcagtcgacgctgacaccgccgaactccggcaactacacactgactttctccgggtcaggcaatatcaaattattcattaacgattcgatcgtgatcaacaaaacctccaataagaaaatcaaagagagctttaacctcctgctcaacaaagataagaagtacaacatcaaaattgaatgcaaagaaatcaacgttcaatcactggtcgaacttagttggcgccctccattttccactcagaaggaaaccccggagaccatcgctgagaatagcgatttagtgatcttattcttgcgtgacgataattcaagtgagggtcgtgaccgtaagaacttacatttaaataacagccaggaagaactgattaacaaagtgaccaaggcaaacccgaacactatactcctgattggaagcgggacagccatttcgctgaaaaatattgttcaaaagcctaaagcgttactgaacatttggatctcgggccagggtgaagcccaggctatctccgatatattgtttggtaaagtgaacccgtcgggcaaaacgcccgtgaccttctttgcggatgaaaaacaactgccaccgatggacgattataacgtgaaaaatggtcgctcgtaccaatacttcaaaggcgaagtactgtttccgtttggttacggcctgtcgtacacgagttataaatatagcagtccgaaagtgaataaaacacattttaccgggaatgatagtatttgtgtgaccacgcaaatttctaacaatggtcaatacgacggtgaagaagtggtgcagtgctacgtgagctcgccggagtgggaaaaagagggtctgaaagaaaaactggtggatttcaaacgtatctttattaaaaagggcgagactcagtcaattaatttcaacatctcgaaagatgatcttttgcgctggaactctaattataaagagtggggaattaccgcaaacaagtatgaagtgtccgtggtcgcacactctgcgatggacaactcctcaaccttcagctactcggaaaattga

SEQ ID NO: 421 - DNA, 2250 bp, Artificial Sequence
  6xHis UPI00084089B2
atgcaccaccaccatcaccatgagaatctctattttcaaggtagcatgaaagagattagtgcatcttcagcgaaacgtgccaaagaacttctcaagcagatgagcatggaagaaaaactgtaccagctgtcgggctgtatgatctttgatatcggtgaaacatacgaccagtgccgtaacccgctttatgggaactatcgctcggccggacactttatgcattggaaacgcaaggagccggcggcgccgtcagaggtagcagctcgcatcaatcaagacattcgagcaagtattgaagcccaaccacacggcattccccctctgattcatgaagaagctctgcatggtgcgcagtggggtatggcaacaatgtttccgcaacctattggcatggcgagcagcttcgatgatgaactggtccaggagattggcgaaatcatcggcaaagagtgcgcggctgtaggtgtccgtcaagtactctctcctgttgttaacattgcccgtgactgtcgttggggccgtttaatggaaaccttcggcgaagatgtattgctgagctcaaacatgggtgccgccatgtgcaaaggcatccgcaaaaatggagtgatcgcgaccctgaagcactatgccgataattacagctacggaggtcgtgactcgaattcatctgacagcagtgagcgtgtgatgcgggaggtgtatctgccgccgtttgaaaaatgcatcaaagaaggcgatgccctgagtgtaatggctgcgtacaatagttggaatggtgtaccgtgcagctgctctagagaattactgacggatattttacgcgaagaatggaaattccctggctttgtggtgtcggactacaaaggtgtggaaggtgtgtgctcttcacatcacatgacaggggaagaatatcaggcggcagcgctgtgtgtgaaagccggcctggatgttaatctaccggcagcctcaggttttagcttgttaaaaaaagcagtggaggagaaaatactgtctcaggaagatgtggacaaagcggtctatcacgtgctggctgtcaaattcgaaattggtctcttcgaacagccttttggtgacgaaaaggaagcagagaagatcgtgcgttgcgaagcacacgaaaaaaccgccctggaagcagcccgcgaatcgattattttattcaaaaacgagaatgtgttgccttttgatcgtaaccgtacttgtcgcgttggcgtgtttggtgcatcagcggccgaagtgccccttggccgtaattactcgggcccttacaaacgccgctgggaggcacaggacgcgaaaaccccgctccagttcctgaaggaatacctgggtgaagacactgaagtagtgtactcgccggattttgatgaagaactggcaaaaggttgtagcgcgatgttgtacttcaccactattattgaaggggaaggtctagatcgctgcaatatttgccttccttccgatgcgatggttcaccaggttgatggagggggtctaattgttgataaagcagaagcgtcagttttcggcaatcaggaggaagatattcgcaaaatgttccacactaaccgtaactctgctgtgattttactgaatggcagcccggtggatatgaccggttggatagatagcgcgagcgccgtccttgaagcgtggtacccgggcgaacagggagcacaggcgatttgtgaaattctgtttggcgactactcaccgtctggtaaactgcccgtgtctgttcctaaaaacgtaggtcagttaccgcttttttacgcacacaaaccgtcgggccgcggctaccactataatgaaaacgatggcaaccccctgtaccccttcggttatggtctgagctataccacctttggttttggctcattctctcaatatattaaagaagatgagatcttgatttcctttgtgctggaaaacaccggccactacgacggaacggaggtggttcaagtgtacgtgtcaggtcgtaactgcgatgtcgtgatgccggtgaaggagttgaaagcctaccgccgcgttaccctgaaagctggcgaaaaagataacgtctgtattaccctaccggcggcctcattccagtattacaaccaggggatgaaatactcattacacaatggcgactttaccgtgatgacgggtaactcgtcagaaaacatgttcaacgagtttagcgttaaaatccgtgaaggtcgcattttcctaaaagattcggaatga

SEQ ID NO: 422 - DNA, 2265 bp, Artificial Sequence
  6xHis UPI000978E914
atgcaccatcaccatcatcacgaaaatctctactttcagggcagcatgccggcagtgggcatttccccggccgccccggtctcacatggtaccggcagaaggaccccaggaccgcgccctgtgactcgcggcatcgtggcggccatggcaaccgcactggctgcaacgctcctcgcctttgtgccggccaccaaagccgaagctgcaccagttctcctgtcccaaggcaaacctgtgaccgcttctagtgaggaaaattatggcacaccagcgactgcagcagtcgatggaaatgcaaacacacgttggagctctgcggcgagcgatccgcagtggatccgcgttgatttaggagcaaccacccgtctgtcgcaggtggtgttggattgggagactgcctatgggaaaggttatcggattgaactgagcacgaacggtagcacttggtctactgcataccagacgaccaccggggatggtggtacagataccctgaacatttcaggtgaagcacgctacgtccgtgtgtacgggactgcccgtggcacgggttatggtttctcgttatgggaatttaaagtctatggcgaaagcggcggcactgggggtccgcagttacctggcggtggagaccttggaccgaatgtccacgtatttgatccgagcacccctaatatccaggcgaagcttgatgaagtgtttgaccaacaagaggccagccattttggtaatggacgccatcagttcctgtttaagcccggtacatataacaacctgaacgcagagatcggcttttatacgtctatctctggtttgggcctgaaacctgacgatacgacaattaatggcgatgtgactgtggacgctggctggtttaatggcaacgcgacgcagaatttttggcgcagcgctgaaaatctggccgtgaatccggttagcggcaccaaccggtgggccgttagccaggcagcaagctttcgccgtatgcacgtgaaaggaggtcttaacctggctccaaatggctatggttgggcgtctggtgggtatattgctgattccaaaattgatggccaagtcggcaactatagccagcagcagtggtatactcgcgagagctcaattggcggctggtccaatagcgtttggaaccagacattcagcggtgtcgaaggcgcccccgcaaccagctttccggaaccgcgatacactacgctgcagacaactccaattagccgggaaaaaccctttctgtacctggatggtaacacgtataaggtcttcgtcccagcgaaacgcaccgatgctcgtggagtttcgtggaacggtacgccgcagggcaccagcattgatctcaatcagttctacgtcgtgaaaccgggcgcaaccgcggccactataaatcaggctctggcccagggcctcaacctgttatttactcccggcatctaccacgtcgatcagactattaacgtcaaccgcgcggataccgttgtgctgggtttaggcctggcaacaattattccagataacggagtgaccgcgatgaaagttgcggatgtcgacggcgttaaactggccggtttcttgattgatgcagggaccgtgaactcgcccaccttactcgaattaggcccacagaattctagcgcggaccatagtgccaaccctacatccatacaggatgtgtacgttcgtatcggcggagcaggagcgggcaaagcgacaacgtcaattgccgtgcactcagatgatgttatcattgaccatacctgggtttggcgtgccgatcatggcgaaggcgttgggtgggaaacgaatcgtgcggattatggtgtgcgggtttatggggatgatgtactggcgaccggcctgtttgtggaacactttaataaatacgatgtggagtggtatggagaacgtggccgtaccatcttttatcagaatgaaaaagcgtatgacgcgccgaaccaagcggcgattcaaaatggtgacacaaaaggcttcgcggcctatcgcgtggatgacagcgttgatgttcacgaaggctggggaatgggaagctactgcaactacaacgtggatccaacgatccgacaggatcatggcttcaaagcgccggttaaacccggcgtcaaattccacagcctgctggtcgttagtctaggcggcatgggccattataatcatgttattaacaatacgggtgcctcaactgttccggcggggaccagtacagttccgtctacgttagttagtttcccctga

SEQ ID NO: 423 - DNA, 1686 bp, Artificial Sequence
  6xHis UPI0009CBF21C
atgcaccaccatcaccatcatgaaaacctgtactttcagggctcaatgggtgaagatccgtacttagcgagtgccattggtaaatcatttgtggaagggatccagtcaacccatgaggtaatggcatgtgccaaacattttattgcatgcagcagcagcgtgaacggtaaagatcgcgggccggttgatattagcgaacgttcactgaaagaggtgcacatacccccgttcaaagcggccatcgatgctggattgggcatgattatgatctctagtgtggaggttaacggcacacccgctctgattagcaaatggttgattaatgacattttgcgcggcgagctcggatttgaaggcattatcacgagcgattggggcgatgttatcaaattatacgactatcataaggtctgcccgaccattggggaggcgctaattaagacgatcaacaacggtgttgatatgatcatggcgccggtggacctgaattacgtagacctgctggagcagaatgtgaataacggtcgcattccgctgtcccgtattgatgatgcggtgcggcgtatcctaaaggcaaaattcaagtttaacatgtttaacaaagagtcgtgcgatatcgtccaggcgcgtgaaaccatcctgtcagaagaggctaaaaatgccgccttaaccgcagcacgcgaatctattgtattgttgaagaacgaagagagcctgctgcctctctcgaaagatatcgatagcattttagtagtaggcgaagcagccaactgtcgccgccacttatgctcaggctggactatggtctggcaaggcgcgaaagaagagcagcttatctcgggcgaaaccattctggacgcagtcaaatcccgtgtgtcctcggaaaccaaagtcgaattcattgaagattacagcgataaggaaaaaattaaaaaagcggcggcgaaatcaggtgtgtgcatcttcgtgatctcagaacaaccgtatgccgaatggttcggcgatgtacaggatctgcagttacccgaagaacagtttgaagcactgaagttcctgcacgcctgcgagatccccattataaccgtgatgatttcaggccgtccgctgaagaccagctgggctgcccaaaacgtgaactcattgctgtggagctgtttcccgggcaccgaaggcggaagcgcgattggcgacgtgatcttcggagaatataacccatctggccgcctgccggttagctttccgaaagacgatagtcctctcccatgtgtctataattcgcgcattaacacgaaatacgaaccgttatacccgtttgggtatggcctgagctatacagagtttgaatacagcgacttggtgctgccggactgcgtttctgaaaaccaggaattcgaggttagtgtgaacgtcaaaaacactggtcgtgttagcggagaggtgatcgtgcaactgtacattcatgacagctacatttcggtgacccgtcccgaaaaacagctgctggctttcgacaaagtatttctggaacagggcgaagaaaaaaaagtatcatttaacatcctcagtaagcaactgtgcgtcctggatgaatcgatggaactggtgctggaaccgcgtgtgatccagttacagatcggcgacaaaacgggcaaagtccagctgtacaattgctctcagaaaaattga

SEQ ID NO: 424 - DNA, 2394 bp, Artificial Sequence
  6xHis UPI0009D5B1F0
atgcatcaccatcaccaccatgagaatctgtattttcaaggcagtatgaagtataaggtaattattgacaacctgaccccggaagaaaaagttcggctgatcaccggcaagaatgtatgggagacttatccgattgaacgcctgaacattccgagtgtatttatggcggatggccctcacggtattcgtaggcaggttgacacgggcgataaccttggtattaatcagtcgtacccgagcacgttgtatccgagcagttccttatcaggctgctctttcgacgaaaacctgatgttcgaactgggtaaacatctggcgatggaagcgaaagaacagggggtaaatttagtgttgggtcctggcatcaacattaaacggcacccattaggaggccgcaactttgaatacttcagcgaagatccgctcgtaagcggacgcttagctaaagcatggattaaaggcattgaaagcgaaggtgtaggtgcgtgtgtaaaacactttacgtgtaataaccaggaaaccaatcgctttcttatgaatagcttagtggacgagcgtaccctgaacgagatttatctgcgaccttttaagatcgccttagaagccaagccgtcggcccttatgaccagctacaaccgcttgaatggtcgctacgttcacgcgaatgcggacctgatcaagaaagtacgcactgaatggggcttccagggttgtctgatttcagactggggggcggtggatgatcgcgtagcgtctctggctggcggcctggacttagaaatgccaagtagcggcgactattatttcaacaaaatcaaacaagcgattaaacagaaaaccctgtcggagcgtagccttgacgaagcggtaaaccacgttctggatctggtgttcaaactgggcccaaaaaaaccactcaaaccgaaaggtggcaatgaatcaaagtaccacgagttagcctaccgcattgcgagcgagagcatggtcctgctgcagaataaaggtatcctgcctcttaaaaaaccggagaaggtgatgttgatcggcgatctgttgaagaaaccccgcctgcaaggtggtggttccagccatatcattccccgcaaagtggactatgtgttggacctcattgacaattacgccagtgatctgacctacttggagaacgaaactgacgttctgaagggaaattgccagactgaactggagcaggcggaaaagattattctggtgctgggactcaatgaagaagatgaaaccgagggtaccgatcgtgtaaccctcgatcttcctctgaaacaacgttctctggtcgaaaaactgaagccgtatttagggaaaacggtgctagtcctcatgactggatccgtggtcattatcccggaacgtgaaaactttggtggtgtagtactggcaggcctgatgggtcaggccggggcgaaagcgttgctggacattttatacggcactgtcaatccgagtggtaaactgaccgagacttacgcagatgcgctagaagactacccggccaccccatttttcgggggcaagacggaaaatgttccgtatgcggagggcatcttcgtcggttaccggtatttcctgacgaaaccaaaggaagtggcgtatccttttggctatggcctgtcgtatactgagttccgctaccagaccattaagggtaaccgctccacactaaccgaaggcacaaatttaaaggtgactgtgagtgttgcgaacgttggcgcaatggcgggcaaagaaacggtacagctctaccttcgtaaggtgaactctcgcatcatccgcccgaacaaagtcctgattgatttccagaaagtgctgattcagcccggtaaaacagccgaattggatttcttcgttccgagcgacgccttcgccgtgtatgatgaaaaagtgcatgactacattattgaaccgggagagtatgagattattgccggtggaaactgtctcgatgagccactggtctttaaggtgttttttggcaaggagaccgaggcccagatcaatccggaaagcttagacgaatacatgcgcgttgagggtctggcgcagcgcatgggttccctgcccaccattccaaaacgcaaacgtccttacaccctgaatgattcctttcgcattctgcgcaaaaacattctgggccgcttgctgttcgcagttattaagaaccaggcgctgaaattaagccgccgcagccgtgaagcctggatgaagaaagtcattaaagcaacccttctagatacccccctgcgtaccttggccgtgatgtcgagtggtgctctcacccttaaacaggcggaaggcctcatagacctgattaacggcaaattcagcagcggcattaagaaactgaaaaacaaagcgtga

SEQ ID NO: 425 - DNA, 2451 bp, Artificial Sequence
  6xHis UPI0004A87350
atgcatcatcatcaccatcatgaaaacctttatttccaaggatcaatgacccacgcattcggtcgcgaggccgctaccattgttgcgcagatgaccataccggaaaaactcgatcttgtatgtggtaatggtctgtggcgtaccacaggcgtacctcgtttgggcctgccgagcctactgatggttgacggaagtaacggcttgcgtgtggtgccggaccagatttccaccgatacccaaaacgccgatctcggcgcctttctggatgcagtggacactacagacgatcctgagaacagggattccaatgtgttgttaggaaaatcagtgccggcaacttgcttcccggcgctgtcggtgctcgcaaatagctgggatatcgcccttgctcatgaagtgggtaccgcgcttgcgattgaatgtcgtgcagcaggcgcccaaatcctgttgggcccgggaattaatctgcgtcgtagcccgttggccggtcgtggtttcgaatatttcagcgaagatccggtattaaccggcgaaatggcggccggtgtaatccgaggcctgcaagaccgcggcgtcggcgcgtcgttaaaacacttcgcatgcaataacagcgaggtggagcgtatctcgatggactccgtcgtcgagcctagagccctgcacgaattgtatctcttagggtttgaacgtgcgattgcgcgctcaagcccgtggactgttatgaccagctataaccgccttaacggtatacaaacgtcgcagaatccttggctgctgcgtggtgttttacggggccggtggcaatatgatggcgcggtcatgtcagactggcatggtattcaggaccttcctgccgctttaaaagcgggtaacgacctcgatatgccttttaatgcggcgaggcgacgtcgtttagagaacgcggtccttaatggcagcatgccggaaaccaccttagatgaagcgtgcacacatattgctgcgctgacattacgtattgttgacgcgcagcgccgtttgccagtaacccgtccagattttgcggcgcaccacgatctcgcgcgcaaagccgcaagtcgcgcgtgtgtacttctgtcgaatcggaacgatgttctgccgctgacaccggaaccaggagaacgtctgctggtaattgggactggtgcagtctcaccggaaattcagggggcgggttcagcagcggtgcgtcctatccagtgcgatattccgctggaatgtttgaaagcaacggccccggagggcgtctccattcgctgggaacctggctggagcgcagacggcgatcacgatgcgcaacgcctggctgcagcgttagctgccgcgtgtacggcggaaacggttattatttttgcttctacccccccgtgtgtatcgggtgaaaatgcggatcgcccagatcttaatttatgcccggcccacgacgacctgattacggaactgacaaaaattcatgaccgtatagtggtggtactcacgcatccggacgcagtagtgcttccatgggcagacaacgtgcaagcgattttaagtgccggatatgccggggcaggtttcggacaggcagtagccgacatcttgtttggtcacgcgaaccctagcggtaaaacaagcgttacatggccagtacgcccggaggattgtccggcgtttctggggtatccgggggagcaaggtacgcatctttaccgtgaaggcatctttgtgggctatcgctttttcgatattcgtcgtattcaaccgctgtttccatttggccatggactgagctataccagtttcacctatgacgtgctggaactcgcaacggaaggcgaagctgttaccgtgcgctttaccctgagcaataccggtacccgagcgggctgggaagtatgccagctctatctgggacgttccccgaatgccccgaaccgggccctcccgcatcacccgctgcgagcgctgaaaggctttgccacagtgcatttagaagcaggtgagagccgcgttgttgatatgaccctcgaccgtcgcgatctcgcctattttgataccgttcgcgaggattggaccgtgcccactgggactgtatctatcgagattggcgcaagcagccgcgacattcgcttagtcaccgaactgcatgtagcaggcgacgcgacgcctgctcgctggttgaatctgcatactccgccgggccaagcattagaagtcgctggagttcaggatgatctcgtgacctggttagccgatgtaacgggtgcctcgattgcggaaatcgagactcgcctggcgccgtgctgtcgctcatttttaggaatctatgatactctatgctggtcttttggcctcgaactggatgaaacgcgcctgacccagattttagatgacgccaaccgtcgtagtggtgctcggaaacccggccaccgctcagaattagatccgagttga

SEQ ID NO: 426 - DNA, 1245 bp, Artificial Sequence
  6xHis UPI00050787A2
atgcaccatcaccatcaccatgaaaacctgtatttccaaggcagcatggttctgggcattgacgagcgcattgatggcgtaaacctaggcaactggctggtgctggaaaaatggatggacccgaaacctttcacccgtagcgcggaagatgatgaaatttggatgcaccgcacacatgtcagtttatggtccgaacgcaatctggcagaagaactgcgccgccatcgtgaaacctacgtgactctcgaagattttcgcattattgtaggtcacggcatcaacctggtgcgtattccaattccgtatttcattttcggtgattggccgggacatccgggttgcattacctacctggatcgtgcatttcggtgggcgcgggagacaggcctgaaaattatgatcgatctgcacaccgtccctgaaagccagaatggttttgataatggcggtctgaccggtgtgtgcaaatgggcacagaacactgacctggtggaatatactctgaacgtgcttgagcgcctagcgcgtcgttatcgcgacgaacctgccttacatagcatcgaggtcctcaatgaaccggtgagttggagcgtttttcacagtaccagcaataccgcgaaagactcccaggaagcgtcaggctcagcctatgtgtctttacgttttttgaaacgtttttaccgtgatgcctacgcccgtctccgtgccgtgttgcgcccggaaacggttattgtctttcatgatggattccgtctgctgcgttggggcggatggtttcgccgtgcgggtatgtgcaatgttatgcttgatacccatcagtatctgatagcgatggaagatcaattgttcagtggtcccgcgcgccgcttatatttgcgttcacgtcgtctgccgtggctttaccgcatgcttgtaggtgcctccagcatcgcgattcgttcagccgcccgcagaattccagtgctggttggcgagtggtgtgtcgaaaaccgctgggccctacattcgcagaaccgcagcgcggcataccgtcaggtatcacgtcttcaacgagcggcctgggatgtgtcagccggccagatttattggtcttaccagctggcgcgctcagcgaaaccggggtcaggggaaggtaaacccccacgtgatcctcgtaatggagggaacctggaagcttgggacttaacccgtgtttggcgtcatggctggattagagccgatacttcacatgatgatgttccgtga

SEQ ID NO: 427 - DNA, 2640 bp, Artificial Sequence
  6xHis UPI0005965863
atgcaccaccaccatcaccatgaaaacttatacttccagggctcaatgagcatcaagatctcttacgaggtcgcaccaggcaatatccgcgatcaggagctcagtctgaaccaggccatcggtctgctttccggtaaggatttttggcgtacccgtgattttcccgaattacaacttggtgcgctgaaatttaccgacggaccgaatggagcgcgtggagaaaactggactgaaggtaaagccgcggtttgttttccctgtgctaccgctctgggtgcgtccttcgatcgcgacttattgcgcgaagtgggaagcgccattgcagtggacgctcgtggcaaacgtgccaacggcctgctggcgccgacggttaatattcatcgttatattctgaacggccgcaactttgaaagttatagcgaggaccctcatttaagcggattcctagccgccgagtatataaacggagttcagtcccagaatgttgcagcgagtccgaaacactttttagggaatgaggtcgagaatggcagacgctggtcggatagcgtgattgatgaacgggcgcttcgcgagatttacctggagccgtttcgcctgctgtgtaaacactcttcacctctctgtcttatgaccgcttacaacgcagtgaacggcgaatactgttcagagagtccgaccttactacgtattgtgcgagatgaatggaactacgatggcgttattatcagcgattggtttggcacttacagcacctcagaggcgattaatgcgggcctggatttagaattgccgggcgagacgaagttcagaacacaacaaaaaatgaccgaagcgctggaacgtggtcagatagatcctgcgcatctgacaactattttgcagcgtgtggtggatctgttacaaaaaaccggacgcattgggctgagcgatgccgaagatgcgcgtggcactctgcccgaactgccgagcgtgccgaatgccggtacaagcgctctgttacgacgcgcagccgcagacggtatggttctgctgaaaaacaaaaacaatgccctccctctgagtgcctcagccggcaacaatattgctgttgttggaaagccggccgcggaaccgtctattttcggcggcggctcagcgtccttaaagcctgcccacatctcgacccctctggaggcgctgtgccagcgttacccgagccttgtgtatagtgaaggggtagcagtgcaaagacttgtggacctgagttgccagatcaaagtgccggagtcagacgtccagctggagtggttcaattcgtccgagccggatgagaagcaactgtttcgcgatgaagtcgttccgaaaagcgaatacatgatgatggaagacattcacgcgggtctggccgatttgcgcagcttctgcacacgcatgaccgttatgattcaaccaccggtgactggcgcataccgcttgtcaatgacttccccagggtcacaaacttgctatattgatggtaaagttgttgggaccgttgcccgtggagcggaagtggtcaccgaagactacatttttaatcgtgcccgcttagaacagcgcattgatacgccgattcatctagaaagcagcaagcagtacaagctgacaatcgttacccaatcagcgaagcactcgccggtgcatatcaaccgggaattttatgtgcaagggtcaagggtgggacttgcgcctatccctgatgatgataaggatattgcggatgccgcggcgaaagttagcgcaagcggtgctgctgccactgtggtgttcgtgggtacctcaactcagtgggaaagcgaaggctttgatcgtgtttcgtattcacttcccctgcgccagaacgatctaatacgcgccgtggcgaaggcctcccccgggccgaccatagtggttgtgaatgcgggttcagcggtcgattgcaccccttggatcgacgaagtagatgctgtcattcaagcgtggttcccggggcaggaatatggaagtgccatttccgacgtactgactgggcgcgtctctccgtccgctcgtctgcctactacgatcccacgttctatggaaggcacatgcacgggcgatctgacaggtaaaacagaaggcgataagggagtccaaaaacgtattgtctatcaggaaagctgggccgttggttaccgcgccttcggcggaaaccgtgattggtataacccgctatttgcttttggacacggcttgagttactccgagtttagttatggcgcgacaaaacaggagttaatctatggcgatgacgacatttcgttagctgtgtctgtgcccgtgaaaaatacaggagctgttaaagcagccgaggtggttcagctatatgtacaacctccgcagggttccgttgaacgccccattgtggaattacgtgcatttgccaaaacgcagcgcctggcatcgggcgaagaacagaccgtgcagctacagctgtcaaaagaagcatttagcttctgggatgttgaaacccacagctggaaagtagaagcgggtgaatatactgtcctcttcgcgggcagcgccggcgttggagactggattgataccggcgaacgtttggctatcacggtggataaaacttttcactggagcgcctga

SEQ ID NO: 428 - DNA, 1281 bp, Artificial Sequence
  6xHis UPI0006377CA4
atgcaccatcatcatcatcatgagaatttgtactttcagggcagcatgagcgataagttcaaatttcccaaagacttcctgtggggtgcagcaactagctcttaccaggttgaggggggtaatagtaacgccgattggtggcagtgggaaaaacaaggtaaagcggataacgagtctggcttagcttgcgactattggaaccgttggaagtcagaccacgatctgttgatggagctgggcgtaaacagttttcgtctgggcattgagtgggcgcgcgtggaaaaagcagatggagtttttgacgaagaggcgattgcgcattaccgcgaaatctttcaagatctgaaaaaacgcaacattaaaacccaggtgaccctgtggtggtggacgagcccgatttggtttcaagaaaactacgggtttcataagaaggaatccgtagagatttttgcacgctacgtgaaaaagatcacggatgaactgggcgacttgattgatgtctttatggtcctgaatgaacctatggtcccgttaggacagggctttttagcgaaagcgtttccgcctggttacatgaatccttttaagttcctccgtgcggtaaacaacctgtccggcgcgtacaaacgcagctacgaaatcattcataaaaaatacccggatgcgcaggtgggtattacctacctatacaactggtacgaatccgagggtttcggaattctgcttaattcaattaatcgtattgcccagtggtatcgcattgacctgtttggcaacaaaattaagggctaccaggattttgtagggatccactactaccgcctgggtaaaattcgctttaactggcgcaacgtaaaaatggacagccgcaaccagatttatatgggcttcaccattgatgagaaccccgagaacgtgatgaagtggatcagctatccggagggcatttacaaagtgctgaagcaggcgtcgggaaaatttaagctgccgattctgatttctgaaaacggcgtgccgacccgtgccgggattgacgatgaagagcgtattgagtaccttcgctcgcacctggtgtttgtacataaggccatatcagaaggcatcgacgtgcgcgggtataacttctggtccctgatggataatctggaatggctgtacggatacgaaccgaaatttggcctgattgaaatggacttcaaaacactggaacgtaaaccgcgtaagtcattttacgaatacgcgaaaatctgcaaaagcaacgaactggaaatcgaggaatga

SEQ ID NO: 429 - DNA, 2439 bp, Artificial Sequence
  6xHis UPI0006228575
atgcatcaccatcaccatcacgagaacctatatttccagggcagcatgtcaacgatgcatacgcatttggacgcatcgttaagcccagaaaaacgcgcaacagccctcctcggcgcgatgaccctccgtgagaaagcctttcaaattaccagcattgcgccgtggaactacgttgatagcgcgggtcagcgtgtagccgccgcagatagctatgtacaacgtggtgccggtttcatttgcaactttggcgtcgacgacccgcagagcatggcagcgacggtagggggcctgcagcgtgtggcgattgaggaaacacgtttaggcattcccatgctcgtccaggcagaagccttaagtggtttcctgtcgggcggtcacatggtttttccgacaccgaccggtttagccgcgacctggtcgccggatctggttgaggccatgacggatgtaatcaggcgccaaatgacacgtgttggcgtccgtcatgcgctgtcaccgaacctggacttgggtcttgatcctcgttggggtcgcgttcacgaaaccttcggtgaagatccgtatctgacagcggcgatgggcgtggcctttgtacgtggcttgcagtcggacgatttaacccagggcgtgatagcaactgcgaaacattttatcggctatggcgccccggaaggtgggtcaaatttagctgcctatgaaggaggcagccgccgcacccgtgatttacatgggtttgcattcgaagcagctatccatctggcaaatctgcaaagcgtgatgaacagctattcagatgttgatgcggtcccggcaggtgccagtcgtgcggtactgaccgacttgttacgcgaaacgttcggcttcgacggcttcgtcagtgccgattatggtacgattgaacagttcgtagatcgtcaacgtgcagccctgactccgggcgaggctggccgtctggcaatccatgccgggttagacaccgaatttcccgttcctttcggatttggggaagccttggcggcggaagtagaagcgggccgagcagacgtcgcggatttagatacggctgttcaccgtgtgctgacagccaagttccgcattggcttattcgaaaatccctacccgcatgaacgcattgatgtggcttctgtcgccgcggaaggtgtggatgttagtcgggagttagccaggaggagtgttgttatgctggagaacgatggtattctgccgttatctccgagcgcgaaaattgccgtgattggtcctcacgccgataacgttgtcaaccaatttgccacatatagctaccctgccttccgtgatatgatggtgcacatgagcagtggcggtatgggaaacatgattggagtggatcccgccatggttgaatggaacaataccgtgttcgccggtggtccgggtgaacactacgtccgtgacaggttaggagctcgtagtttaggtgaagtgctggcggaacgtgctgcgtctgttgtggtagaacgcggcgcgtcactgaccgcagatttaaccgatgcggagttcgatcgcgcagttgccaccgcggatggggcggacattgtcattctggcgctgggtggagcctcactctggttcaatggcgaacgtaccgaaggtgaaggctcagattctgcagatattagcctaccggcggcgcaaacacgtcttgcggatgcagtagcagctaccggcacaccggtagttaccgtgctgactcagggacgcgcctatgttttaccggaaagcgtccgcgcaagccgcgcactcgtggttgcacctttcggcggcccgtttggacctgacgcagtggcagatgtgctgtttggagaagtcaacccgagtggcaaactggcttactcaattccacgctcaccgggccaaatcccggtatatcatcatcagcgttcaggcaccggctatcgaaaaccgttgcctccggacgtgacccatcattacctagatactgaggctaccccgctgtacggttttgcacgtggtgagagctttacctcatttgagctgattgatctggaggcggatcggactatgacgaccgatgggagtgttcgaatttctgcgacggttcgtaacaccggaggccgtgccggggcaaccgttgtccagctgtacgcgggagcgtttggattaggtgttacccgcccggcgcagcaattagccggttttcagcgagttgaactggatgcatcggcgagtgtccgtgtatccttcgaggtacaggcacgtcagttcggatacaccgcactggatggcgcattcacggttgatccggggccgttaaaactttggatgggcttcgattcagaaactcctgctctggccaccgaaatcgaagtaaccggtgcacgactaccgctcaagagcggagagaggtcctttctgagtgtcgtgactgtgggctga

SEQ ID NO: 430 - DNA, 2280 bp, Artificial Sequence
  6xHis UPI0006C454B4
atgcatcaccaccaccaccacgagaatctgtacttccagggcagcatggaacagcgcaaacttaaacagttactgagtgaaatgagcttacgcgagaaaataggccagatgattcagctgacgggtatctactttgatgacgatgccgtcctcactggtgaagtgggcgaagatcaacctcctcagtgggtaacccagtatgcggggtctgtgctgggcatgatcggagccgagaagctgcgtggtatccagaagaaatacgttgaggcacatccccatcacattcctttattatttatggcggatgtgattcatggttgccgcaccattgcgccgattcccctgggccaggcttgttcattccatccggaactcgtgcgcaagatggcgggtcatgctgcggcggagtcagcgagcgaaggcattcgtgctacctttagcccaatgatcgatgtatcccgtgatccacggtggggacgtatcatggaatctttcggtgaagatcctttcttaaatggcgttatgggaaccgcgatgctccgtggatatcagggtgaagaggggaaggatccggcgggtaataaaaaaattcctgaatctggtatagcgggctgtctgaaacatttcgcaggctatggagcggttagcgcgggccgtgaatacaatgacgtggaaattagccaacgtactttccgcgagcagtacctgaaaccctttcgtatggctatgcatgcagatccagcgatggtaatgaccgccttcaacgcggtcgatcgccgcccggtcagtggtaacaaagagctgttagaaggtacactgagggaggagatgggtttttctggtaccgtcatctccgattggggtagtattggtcagctggaagagcaaaacgtggtgagcagccagaaggaagcggcggaagccgcggttcgcgcaggtgtagatatcgatatgatgagcccggcctatatgttccacttagaagaactggttaaagaaggcagcattccgaccagcctcatcgataaaagtgcgtggaatgtgctggtgatgaagaaccgcttgggactgtttgagaacccttttgcgggtatgcaaggcgaagaacctttgtccgcagaagcaaaaaagaccgcgctggcgttagcgtgcgaatcatcagtcctgcttaaaaatgatgacatgttaccgcttaagccggaacgaaaagtgttttggggcggcccatacgtggaatctcgcgaattattgtcgcgttgggcgattttcggtcgctatgatgatgttgaaaccatccgtgaagttctgaaagcacgtaaaatgccagtccgtttcttacctgagtgcgaaattctgaccgaagaagaacgccgtctgtggcaggcggaaaactgccgcattcaggattcgggcgaacaggataaggaaattccggaaatctgtgtaaactccggtaaacagtatgccaccctggatgaaatcgagccggaagacacggtggtgttagtgctgggggaacacgaagcgcagagcggcgaagcggcgagtcgcgcgtttcttgacttacccgaaggccaacagaaattctttgacgccgttgcggggcgcacctcacacatcgttacagtgatcctgtcgggccgtccgcttgatatccgcaaaattgccgaaaaaagtcaggccgtactgttcgtttggaggcctggcactatgggggccgaggcggtagtacgtctggtgtatggggaagagacgccgtcaggcaaactatcggtgtcgattccttggtgtgtcggtcaggtaccggtgtcctactgggatgttaagacgggccatcgaatggtggaaaccaaccctgaaaatcgttttacctcacgttacatggacattccgaacgaacctctttatccatttggctttgggcttagctataccgagtttacgattaccccccctatttttgagaaacaggagcgcgaagataagattgacattagttgcaaggtgaaaaatgtaggtgaagtcccgggcgccgaagttgttcagtgttacgtagagacactgtgtgcgccggtagtccgtcctgaccgcgagttaatccgttttcgtaaaatttttctgctgccaggcgaggagcaggaagtaaaattcaccgttaatcgcaaagagctcgccttctatggcgagaatatggaactgatcgatggtgatgtccagtttcggtttatcgtaggtaacagcagccgctccgaagctggctctattctgtacgcgttttga

SEQ ID NO: 431 - DNA, 2625 bp, Artificial Sequence
  6xHis UPI0007F1D695
atgcaccaccatcatcatcatgagaacttatactttcaaggcagcatgggtgatacggcgaacacctggcttaaacccgactttgatattgaacaagtgttggcgaatctacagactctagatcgcgtgcatctgttacgcgggggcaatggattctcttccgcaaagttactgaaccacggtattcctccggtgcgtatggtcgatggtccgagtgggtgtcgcggtaccgtgatttacaacggtacccgtgccaactgtttcccatgcgctgttggcattggctcatcctttgacctgggacttgtcaaagatatggcgaagcagctggcacgcgaagcccacgcgaaaagttcacacattctgctcggtcctaccctgaatattattcgcagtcctctggccggccgaggcttcgaactctttagcgaagatcccctgctggtaggcaaaatgggtgccacctacatcaaatcactgcaagaggaaggcgtggcaaacgaacaagaattcaacaagcacacagcggagaccgtggtatcagatcgtgccctgcgagaaatctacttagaaccgttccgcattgccgttcgtgaaggtgatccgtggagtaccatgatgtcctattccaagatccacggcgtgcatggctgtgacagcaagtttctgatcgatgacgtattacggaaagagtggggctacggagggacagtaattagcgattggtacggcacacacagtaccagccgctctattgaagcaggcatggacctagagatgccaggtcctagcatctggcgcacggatgcccaggtattaagtcatttggaggcaaacatgattgataaaaaagccatcgaaaaatgcgtccgaaatatgctgaaactggttaagcgtgcaattcaaagcaaaatccctttcgagggccctgaagtagccctggataccccggagattcgagctctgctacgtcgcgctgcggctaatgcggtggtgctgctgaagaatgatctgcaggtcctgcctattggtaacaataaacaccgcaaaaccccgtctaaaatcgccgtgttcggtcacaacgccggtcagcacttctcaagcggcggtggagcggctagcgtgcctctggaaacttttagcaattcacccctaagtggcatccaggcggcggcgcaagagatcagcgccgaagtaacctattctttgggcaccgtggcttatcaatacgttccggtcgccgatcgttacctgagcgtcccgagccgcgatggcgtgagtggagtggcccgtattgaattttggagtgaacagccccacgacgaatggaagactactaaaggcaacattgttattgaaaaaccgtcagaccacgatatgatttcacctaccgcacgctgctttatgcacgacggcgtacctgatcacattggcaaagacggtcattatgttcgcttcaccagctccttcattccggaccaagatggcgattggcgtatcggactcgcgagcatcgatcgcgcgaatctgtttgtggatggccagctggtaattggctatgatgacaatctcaaagatggcaccatgtttttccacttctgccatgaggaacgttcgtgcgtgctgcacaatctgaaaaagggtcagaaataccaggtggaactccgctgctgggacactacgaaactgcattcgcttccggtcaaaatgccggcgggttttagtattggtctcgtgcgcgaactggatccacaaggtgcgattgatgaagcggtggccttagcccagactagtgatgaatgcatcgtcatggtgggcttaaacaaggaatatgaaagcgaaggttacgatcgtcaaaccatgcgcctgccgggaaccagcgataagctggttgaagcaattttggcagtgcgtcctgacgcgattattatcacccagtcaggtatggcggtagaaatgccttgggcggaaaaggccgcaaccattctacacgcgttttatggaggcaccagtttgggagacggcctggccgatgtgctgttcggccgtgtaaatccgtcagcgaaattgccgatgaccttcccgaaacgcattgagggctcaagttcttatcctcacttcgcacacctgagtccaagccacaagcaggttgtttatgccgaagatatttatgtaggctatcggctgctcgatcgctctccggaacgcatccgttttcccttcgggcatggactgtcgtacaccaccttcgcgtactctgatctggtgattgaagcggccagcgaatttggccagtttactgtcaaattttctatcaaaaaccagggcagcctgtttggtgcagagagtgcgcaggtctatattcgtccgttgtcgtcggccctgccgcgtccgtataaagaactgaaaggctttaccaaagtgtttcttaccccgcattccagtgcccaggccaaagtgaacctggatcgttcagcttttgcgtattgggatgacagagaagatggtggtagttggatcgcagaacaaggcgaatacgaagtaatcgtaggcgcttctagcctggatctgcgtctgaaagcaatggtcactcttgaccgtacagagatttggcggggtctctga

SEQ ID NO: 432 - DNA, 2454 bp, Artificial Sequence
  6xHis UPI0008232A70
atgcatcaccatcatcatcacgagaatctgtatttccagggctcaatgagcattcgcttaaccgacaaagcgagtgtacccgcagtagtggcagagatgacccttgaagaaaaagctcgattagtcaccggcgaattcccttttacaacggcgggtataaaacgtctggggataccgcccatgcgccctctggatggccatacaggtatcaacatgggtcagcttcgctctgatatggcgagcaagacgctggccaacaaaagcgtagatgagctgggtgaaatgtcgggccccgcaatttccggttttggaacagtgatcacgaacgcgaaagatcccgcaaaacgggcgaaaatggctccgagcattcagaaactggtacaagaagtccttgataaagtcgatgagcttatgccggatggtatgtaccctggctgtttcccgccaggtattatgcaggggagtacctggaacccggaagtgatcgaaaaagaaggcagcgctgtcggtaaggagatggatgcctacaaagtggatgtatgtctgggcccgaatgtcaacatccatcgtgatccgttaaacggccgcctgtttgagggctattccgaagatccctatgttactgcaaccctggcgccgtactacattcgtggaatgcaagccgagggtgtagctgcggatgcaaagcatttcgccgcgaataatcaagaaacccaccgccaagaaatcgatgaacgtataccgctgcgcgcgttgtacgaaatctatctgccggggttcaaagcggccgtgcaacaaggcaaggttaaaaccctcatgagcgcgtataataaaatcaacggaacagcatgcgcactgaatcattggctgcttacagatgtgctacgcggtgaatggggattcgaaggatttgttgtaagcgactggggcgcggtctatgaccaggtggatgcgattaatgccggaaacgacctggagatgcctggtccgctcacctttgataaaattgtggctgcggtaaaagacggacgtattgatgagaaaacacttgaccagcgcgtggctaattacctgaacgtcctagtagaacttcccgttatgaagggtcgcaagaatgcgcacattgaccgcgagtattcacgtaaggcggcttatgatgttgcagcggaaggcagtattttactcaagaacgaaggggcccttcccctcaacgaaggcgctaagatttctcttattggcgaacacgccaaggactatattatttgcggaaagggaagcgcatttattgacacggatcaggccaccaatctatatgattgcgcagtggagacccttggcgcggataaggtggaatacggtgacgtgagcgcggactcagatgcggccatcattgtggtgtcagttgatggtcaggaaggctcggaccgtgcagatctgttgctagctcccggcgatgatcagatgattctcgatgccgctaaaaaagcccacgcgaatggtaaaaaggcgattgtgattctgaacgttaccggtccggtggaaatggagggctggctggatcaggtcgacgccgtgttatgcgtgtggctgcctggtatggaaggtggtcgcgccaccttggacatcttaacaggcaaagtcaatccgagtggtaaacttacactgaccttcccgaaacactactacgactgtcccacctacgggaattttccgggtgatggggatgaagtgtggtacggtgaaggtatttacgtcggctatcgctactatgataaaaaacatgtggaaccgctgtatccgttcggttatggtttaagctataccacattcgagctcagcgacattgcaattgatcgcgacgtaatggatatggacaaaggcgaaactgtaaacgtaagcgtgaaagttaccaacacgggaaaagtagcgggcaaagaagtggtgcaggtgtacatatctgacgaagtgagcacactgtcaaaaccactgaaagagctgaaaggcttccagaaagtcgccttgcagcctggcgaaagcaaagtagttactatcgcaattggtaaagaccagctggcgagttacgatccggctgcgaaagcgtgggggtcggaaccgggctattaccaggctctcgtaggcacctcaagccgtgatattgccggtgcagtgcgttttaaagcagtcggctacaacccgtttggctacggcgttaactgttcgataggcaaaattatggcaaacccggctgttgtcgaagccatgaaaaagtatatcccggcccacttactgagcgatgaatccatgagtagcgaactgacatacttccccgaagcaaagctgcagaagatttggaacgaaaagttcagtctggcctttaaagataaatcagaaaccgaaaaacaggcaatactggatgccatgtgcgcggaaatcgccaaaattgaggtaatatga

SEQ ID NO: 433 - DNA, 2520 bp, Artificial Sequence
  6xHis UPI000866CB30
atgcaccaccatcatcaccacgaaaacttgtactttcagggaagcatgtgctttgacgtagaggaagtactgggccagttaacaatccaagaaaaaatctcgctggttagcggcgtagattattggcataccgcgcccgtccatcgcctgaatgttccgagcatacgcacctcagacggcccgaatggcattcgcggccagcatcattttaatagcacaccgacggccgcaatcccggtaggcactgcgctgggtgcaacatggaacaaagaattgttatacaaggcaggccagctgctggaaaaagaagcgcgtgcaaaaggcgcaggcgtggtcctgggcccgacggtgaatatccagaggattccgaacggtggtcgcggctttgaaagcttttcggaggatccgctcctctccggggaacttgcagcctcatatattaagggcattcaatatgatggcgtggccgcgtgcatcaagcattttgtaggcaatgatcaggaaaacgaacgtttttcctcaaacagtattattagcgatcgcgcccttcgtgaaatctatctaaagccgtttgagattgcaattgagaaagcgaaaccgctggcgctgatgaccagctacaacaaagtgaacggggtgcacgcatcggaaaacaaaatcctgtatagtattctgcgcgaggagtggggatgggatggaaccgtcatgagcgattggaccggcacctattccacagcggaagccatcaatgcgggtctggacttggagatgcccgggccggctaaattccgtggggtgctgctccagcatgctttactggccaaaaccgtgagcctgcgtgcattggatgaacgcgtgaaaaatgtgttgcgtctggtccatcgtgtgcaggcgtcgcaaattccggagcgtgcgcctgaaactgaacgcaacttaccggaagatcgtaaactgcttaaagagttagcgtccgaaggaattgtcttactcaaaaacgaagataatgtgctcccacttaaccgtcagaaaaaagtcctcgttgtaggcccgaacgcgccgtacgcgatctacagcggcggcggctctgcgttatcgacaccgtattactatgtcagtccgttagaggccattactagcattgttggtgacgaaaaggttgtgtatgactttggcgcctataatcacaagtatctgccgtcattagcgcaggagctgtttaacggcgagagcaatggaacgctgatagaattattcaatgaacctcctagtgttccgggacgcaccccattcgatacgatccagttcaagaacattaattatttccgcatgaacgactatacccaccctgggctgaaatcgctgcgcttttatgcgaccttgacttcgacttttatcccgcagcatgacggcgaatatacttttggtattgcggtcgacggaaccgctaatctttatattgataatgagctggtaatagataacagcacaaaccagaaactgggagaatcattctacggttcaggtaccgtggaagtctacggcaaatatcaggtcaagaagggcaaaagctatgccctgcgtattgaattcggcagctctgctacttctaatgtcagcggcaataggaccttttccggtggcggtggtctgcggttcggtggcttgaaaattgtaccaaaccctattgaaaccgtgctgcagaaggctaaagactacgagcagatcttagtcgtgaccgggttgaaccacgatcatgaatcggaaggcagcgaccgcgatgatctgaagattccgggcgagagtaataaactcatcgaagcgctgttagaagccaatgcggataccgtggtagtgattcagagcggtacgccggtggaaatgccgtgggcctcgcgtgtaaaggcgctggtgcatcagagttatggtggtatggaaggctcgaacgccttggctgatgtattattcgggaacagcagtccgagtggcaagttgccaattaccttcccacgccgcctggaagacacgccgagttatattaacaataccacgcagaatggtcgcgtactctatggggaagatatttatgtgggatatcgctacttcgacaaggtcagcagagatgttctgtttgccttcgggcatggcttgtcatataccagctttgaattaaccggattagttgtgaacgtcaacggagatcttctcgaggcatcactaactgcacgtaacacgggacagctgcagggctcggtggtcgtgcaattgtacattgggaaagctgatagcaaaggccgccctgtgaaagaactcaaagcattcgagaaacgcagcctgaaaagtggccacgaacaactgatcactttttccgtaccacttaaaacaagcaccagctatttcgatgaagaggtccagaaatggctttctagtgccggggaatacaatgtcatcgtcggacagagctccgatgatgttaagtcggttacgcaagcgttcaccttgcaccagtcaattgtatattga

SEQ ID NO: 434 - DNA, 1830 bp, Artificial Sequence
  6xHis UPI0009D3483D
atgcatcaccatcatcatcacgagaacctttactttcaaggtagtatgcggtcaatgaatatgcattggacgtttaacccgaatatcgaagttgccagagatccgcgttggggtcgtgtaggcgaaaccttcggtgaagatccgtacttagtgacgcaaatgggtattcagacagtgaaggggtatcagggcgacctgaacagcgaaaacgatgttctggcctgcattaagcattttgtcgcaggttcggaaccaattaatggtacaaatggtagcccggcggatctgtcggaaaggaccctgcgtgaggtgttcttcccgagcttcaaagccggtgtcgatgccggtgcaatgtcagccatgatgtctcacaacgaacttaacggaatcccgtgccacagcaatgagtggttgatgacagatgtactgcgcaaagaatggggctttaaaggatttatcgtgtcggactggatggatattgagcatctttacgacctacatgccaccgccgaaaacctgaaagaggccttctaccagagcattatggcgggaatggatatgcacatgcatggcatccactggaacgaattagtgtccgagctggtcaaagaaggacgcatcccggaatcgcgtattgatgaatcagtccgcaaaatcctgaccatcaaatttcgcttgggccttttcgaacacccgtatgccgatgaaaaaaccaccatgaaaatccgcttgaacccggaacatcgccagaccgcgctggaagcagcgcggaatagtatcgttctgctgaagaacgacggcatcctgcctctgaccgaaaaatataaaaacgtgctggtaacaggcatcaacgccaacgacatgaacattttaggcgactggtctgcggtgcagaaggatgaaaacgtgattacggtgctggagggcttaaaaatggtgagtccgaacacttactttgagttcgtggatcagggctgggacccacgtaacatgagcccggaaaaagtgaacgaagccgcggaaaaggccaaatcttccgatcttaacatcgtggtggcgggcgaatacatgatgcgctttcgctggaccgaacgtacgggtggcgaagatacagatcgtagcgatattgatctggtggggctgcagaatgagctgattgaaaaggtggccgccagcggtaaacccaccattcttattctgatcactggccgcccattaggtgtggaaaaagcagtcggcaaggtcaacgcactggtgcaagcgtgggaacccggcatgtatgggggtgaagccattgcggaaattctgtatggaaaaatcaacccttcggcaaaactgccgattaccattcctcgctcagtcggccagattcagatgatttataaccacaagccgtcgcaatacttccatccgtatgtggtcactagctcagagccgttatacccgtttggcttcggactgtcatttaccacctataaatatgataaccttcaattgagcggcagcgagatttctaaagacgagaatctggaagtgagcgtcgacgttacaaatacggggaaaatggatggcaccgagattgtgcagctctatctgcgggataagttcagcagcgtgacgcggccgatcaaggaattgaaagactttgcgcgcgtaaccctgaagacgggcgagacgaagaccgtccatttcaccgtatcgccggataaacttaccttcctggataagaacttgaaaccggtcgttgaaaatggcgagtttattgtgatggttggttctagctcccgcgaggaagacctgttaaaacagagcttctacgtgaaagaatga

SEQ ID NO: 435 - DNA, 2547 bp, Artificial Sequence
  6xHis UPI0009CC9AEA
atgcaccatcatcatcatcatgaaaacttgtatttccaaggttcgatgtcagagccggacgtggaaaatcgaattaatggcctattgaaacagatgagtctagaagagaaaaccagcctcctgcatggtaatagcaaattcaacactgcgggaattaaacgcctaggcatccctcgtctgcatctcagcgatggcccgcatggagtccgccgtgagactgaagagcactcttgggggccggtaggatgggaagatgattatgtcacctatctcccaactggctcggcgttagcgagtacgtggaacccggcactgggtcgattatttggggagaccctgggagccgaggcccgtcaccgtaataaagacgtaatcctgggtcctggcattaacatcgttcgtacacctgtctgtggccgcaactttgaatatttcggcgaagatccataccatgtgggtaaaatggcagcggaagtcgtgcgtggcattcagaataatgacgtggccgcgtgtgtgaagcattatgcgctcaataatcaggaatggaatcgtggttgggtgaacgcgattgttgatgaacgtacactgcgtgaaatttacctgccggcgttcgaggaaactgtacgcgcaggggcgttgacgtttatgggtgcctacaatcgctttcgtggccagtggtgctgcgaaaataagtatctcgtgaatgacattcttaagggtgagtggggctttgacggcgtatatctctcagattggggaggggttcactcgacgcgagactcggcacttaacgggcttgacctggagatgggcacatccgacaactacgatgaatttttttttgctaggcctctgcgcgaggcggtcgaggggggcgaaattccagagagtgtcgtggatgataaagtccgacgtatcttacgtgtgatggcacgcatcggagctttagatcctgccacgcgtaaaacaggcgcgcgtaatacggcggcgcaccagaaagccgtccgcgcgattgctgatgaagcgatggttttgctgaaaaacgatggcgttctgcccttagacattcataaaactcttaaacttgccgtgatcggcgaaaatgcggacaagaagcatgccgatcagggcggcagcagtgcgattcgtgccctgtatgaaattaccccgttagagggattaaaacgtaggggcggggacatggtgaaaattacctatgtgcagggctaccgtgatactggtgacgccgctgccttcgaaccgattggcgaaccatacgttcagacggttgatccgaaagccggtgttaggtgttggaaggtcgagtatttcaataacagagacttacacatgccgccggtcactgtacggtacgaaaaaagcgtggattttgactggcaagaacgctctccggcaccgaacgtgtcggaagataacttttctgcacgtatgaccgcagagattaaaccgacggcgagcggtacccatcatatcggcctgacaagcgacgatggttcacgcttaaaaattgatgggaaagtggtgattgatcactggggcgaccacggtgaggaacagaaagatgcccgcgtggagttagtagcaggccagacctatcgatttgaagtagaatattatgacagtggcaaaggcgccatgctgaagttaggctgggtgaccccggattcgtcagccgcagacccggaagtagtctttgcggccgctctggaagcagcacgcgaggcagatgccgtgctggtgttcgcgggtcagaaccaccgttacgatactgaaggcgtggatcgccgcgatatccgcttacatggacgccagaatgacctgattgaagcagtcgcggctgcgaacccgcgtaccgccgtttttatcatttcgggctctgcagttgaaatgccgtggattgacaaagtgccgtgtgtcgtgcaagcctggtacgccggtatggaagtcggcaacgccgccgcgggcattgtgtttggtgacgtgaacccatctggtaaattgcctatcacctttccgaaacgccttgaagatgttccggcgcacagcatcggtcaatacaacgaccaagactgcgaatatcgcgagggattgcttgtgggttatcgtcactttgacacccgcaatgcggaaccactttttccctttggtcacggtctgagctacaccaaattcacctatggaaacctgaaagtggatccggcgacgctggaagtgcgcgtctcggtaaaaaacactggtgcacgcaaaggtaaggaggtagtccaactgtatgtgcacgatgtccagagccgcctaccgcgcccggttaaagagctgaaaggttttgaaaaagttgagctggcgccgggcgaaaccaaagaagtagcattccgattagacgagcgtgcattggccttctatgacgctgatgccaaccgttgggtggtagagccgggtgatttcgatatccttgttggctcatccagccgtgacatccgtctcaaaggacggttagcgtatgccggtcgcaagaaaggtccgctgtga

SEQ ID NO: 436 - DNA, 2232 bp, Artificial Sequence
  6xHis UPI0009C6DE73
atgcatcaccaccaccaccacgaaaacctatactttcaggggtcaatgacgcataaccgctacctgaaaatccttgtgctgttaattacgggcaccttttttgtgccgcgccttggagcgcagcatcatacctttcataacacggatctgagcgactctattcgtgtggatctgctgctggatatgctcaccctggaggagaaaatcaacctcctgagcaccaatttgggtgttccgcgcttgggcattcgcaacgcatggcatagcgaaggtttacatggcatggcgctcggaggccctgcgcattggggcggtaaagaagattcaccgacatcaacctttccacaagcatacggcctaggttcaacctgggataccgccctggtgaaaaaagtagccgagattgaagcccaagaaattcgctattacacccagcgaacgccggaacctaaaggtggtctggtgatgcgtgcaccgaacgctgatctggcacgtgatccacgttggggtagaaccgaagaaagttttggggaagatgcctatcttgcgtctaggatgaccgtctcgtttatcaaaggtttgcagggcgaccaccctcgctattggaaatctgcaagcctgatgaagcacttcatggccaactctaatgaagacggccgtgatagcacctcctccgacttcgatgagcgcctatttcgcgagtattactcatatccgttttacaagggtattacagaaggaggttctagggcattcatggcttcgtataatgcctggaacggcattccaatgaccatccacccgatcctgaacagtatcacgcgccgggagtgggggaataatggcatcatctgtaccgatggcggcgcattacgcttactgattacagcgcacaaagcattcccgacgctttgggagggtgcagccgcagtggtgaaggcaactgtggggcagtttctcgatgactacctgctggcagttaatcaagccattacctatggtgtgctgacggaaggagatattgacaaagcgatccgcggcaacctctatgtagcacttaaactaggtctgcttgacagcccgatggactatgccgcccaaccttatactggtattggcgtgtctcagatggaggaaccttgggaaaaacaggaagtgaaagatttcgttcgtcttgtgacagccaaatcagcaatcctactcaagaacaagcctgcgggtggagaacgcactccgttacttccccttaactcagcgaaaattcgtagcatcgccgtcattggtcctcgtgccgacgaagtcatttttgattggtactcgggaaccccggcctatactgtcaccatcttagaggggattcgtaacgccgtaggcccggatgtagaggtattttacgaaccttcaaactctatggataaagcgtttattgcggcgtcgaaggcagatgttgcggtggtatgcataggcaatcacccttatggtacgaatgcacggtggttttatagcccggtccctagcgatggccgtgaagcggtggatcgcaaggcactgacattggaacaagaagacctagcaaaagtcattcttaaagcaaacccgcgcactgtcttagcgctggtttcctcatttcctttcgcgattaattggagccaagagcatatacccgcgattgtccacattactaacaactctcaggaacttggcaatggcctcgccgatgttcttttcggcaaagtgaaccccgctggtagaacaactcagacctgggtgcgcgatattgccgacctgcctcctatgatggattacaatatccgtaacgggcgcacttacatgtatttcaagggcgaaccactgtacccgtttggctatggtcttagctatacatcattcgcgtatggcagtctcaaaatgccggaatcgtttaccgacaccgtacagattgaggtgatgatacgtaacaccggtcctctggatggcgaagaagtcgtgcagctctatgtggcgtacccgtcgtctgcgctggagcgtccggtgcgtcagctggcaggctttgaacgcgtgctggtaccggcgggagagacccgtaagattatcttaagtctgaaggcgtccgacctggcgtattgggacgtcgagaaacaacgttttgccgtggaaaaaggtaaggttcgcgtgctcgtcggtagctcaagcgccgacattcgctccgaaggtattctggagatcatgtga

SEQ ID NO: 437 - DNA, 2175 bp, Artificial Sequence
  6xHis UPI0004E051A9
atgcaccaccatcaccatcatgaaaacctgtattttcagggctcaatggcattagcagccccgacaagcaatctgctgacgtgggatgaagcctacgctaaagccgaggcgctggtgtcgaaaatgaccttagaagataaagtcggggtcgcgactggtaaaggctgggaaaagacactgtgcgtcggaaacacgtttgaatccgacagtactgacttcccttcgctgtgcctgcaagatggtccgttaggtgtgcggttcggcgacaatgttacggctggcctgtcagggatcaccgcggcggccaccttcgatagagacttactgtacaaacgcgggagctacatgggacgcgagttctacttgaaaggcgtgaacatggcactgggtccgtgcgttgatattatgcgcagtccggcgggggggcgcggttgggaaggcttcggcgaggatccatatttgcaaggtgtggcgggagtggagactattaaaggtattcaggatcagaatgttatcgcggtggccaaacacttcgtgctgaataaccaggagaccaacaggaagaatagcagctccaacgtggacgaccgcacgttgcacgaaatttacatttggccgtatgcccgcatgattgaagcaggcattggtggccttatgtgctcgtacaaccagattgacggcacgtgggcgtgtgaggacgagtataccatgaatacggtcattaaacaacagcatggttttcgcggtttgatcatgacggattggggtgcgcagatgagcggtattcctagtgctttggccggcctggatatgacaatgccgggtgatattgttatgggcgacggttatagctggtggggacctaacttgactaaatatgtggaagacggcgacgtacccgaagatcgcgtaacggatatggccacgcgaattacggcagcgtggtataaaatgggccaggataaggatttccctgaagtgagtatccgcagtttcgaccgtgactctgccccggaggttctcgtggatgcggacggcgaacatgcaaaaattgtccgtgaaatgggagcggcagctgcggtggtcttgagcaatgatggcgtgctgccgttatcagatgacttaaagaaaattgctattgtcggcagcgatgcgggtccgattcctatgggtctgaacaattgctcggatcaggcctgtggtgcgggtacgctcgccatgggttggggcagtggcaccgccgatttcccgtatctgattacgccgtatgacgggatcaaatcccgtgcgggggatggagtggaagtagttcacacctatgacgattgggacttggacaaagctaaagacatctcaaaagatgcagacgtagcaatagtgttttctaatgcagactccggcgaagaatatttggaggttgatggcaatgtgggtgatcgaaaaaacctcaccctgtggcacaacggcgataatctgattcaggccgttgcggatgccaatgagaataccatcgtggtgattcacgccgtaggcgccgtgttgatgccttggatcgatcatccgaacattaaagccgtggtttaccctgggcttccagggcaggaaagcgggaattcgttggccgatgtgctttttggagatgtgaacccctccggtcgtctaccgtttactattgcgaaaaaagaagaagattatccggcgcatatcggacatgacttcaacgtagaatatacagaaaaactgcaggtgggttacaagcactttgatgcgaataacatcgagccattatttccgttcggccacggccttagctacagcaaattcgaatacagcgatctgaaagttaaagcaaataaaaaggctaacaaggatggggtgctggcgaccgccactgtgaccgttagcaatcagggggatcgcgacggcgcggaagtgccgcaagcttatattgggtttccagaagacgcgggtgaaccacccaaactgctgcgcggctttgataaggtgtttatcaagaagggtaaaaaagcgaaagtaactttcgagtttaccgaagtagatctgagcacttttgacgccgatagtcagaaatggaacgttgtgagcggcgaatttactgtctatgtgggcgcgtcctcgcgcgatattcgccaaaccggcaagtttacattgtga

SEQ ID NO: 438 - DNA, 1560 bp, Artificial Sequence
  6xHis UPI0005060F52
atgcatcaccatcatcatcatgaaaacttgtactttcagggctcgatgataatgacaaccccgaacttctacgaaggggcgttaaacgcgattcatcgcggtctgattacggaaagcgatctggaccgccccgtacgtaatgtgttgcggttaaaatttgaactgggcctcttcgagcacccccgtactcccgatcaggctcgcattgccgcagcgatcggcacccgcgaacacacggagttaaatttacgcatggcgcgtgaaagcctggtattactgcgtaacgatgggactctgccgttgaatacacagggcagtaacgtgagcaccaccgcgcaatcgtttagctctgtgacccatgatacgaagccggatcagcagaagccaattgcagcagcgtcagtggccaatcagcatacaattgcccttattggaccactggctgatgaccctaaaaatcagctgggtgattgggcgggaggctcgggacaggtttcttggattaaagaagaaccgcgcgaaacggttgtgaccgttcgggatgggctgcaggaagctcttccccataattattcactcacatacgccaaaggtgcaaatatcctaaccctagaagcggacccggcgggcgcaacttttcctgatggtcagcctagaccgccaattcagacaccgtgcgctccggatcctcacatgattaatgaagccgcagatgccgccgcgaatgcggaaacgaccatcgtagtagtaggcgatgtgatagaacttgtgggtgaaggccgttctacagcgaccttagaactgtttggcgcgcagaccgcattgttagaagcgattgcacaaacgtgccacgataatcatcacccgtggatcgtggtgttaatggctagcaaaccattggtgctacctcaatgcacctctcaggcagcagcaataatttgggcagggaacccgggcatgcagggaggtcgcgcattagcagagttgctgttaggcaagattgagccgcaaggccgcctgccgatttcattcgcccgtcattcgggtcaactgcccatttactacaaccagattcgtggtcagcatggttcacgctacgcagatcttacccaggaaccggcatttagcttcggtgaaggtctgtcgtacacccatgttgattacagtaatccgtgcctgtcggtcgaaggccgggccaatgataatatacacggtggccgtctacaagatgtccacatggatgatatcctgcgcattaccgttacactgcacaacaccggacagcgtccgtgcgtagagaccgtgcaggtttatgtgcgcgatgtggtcacctctgtttcatgggcggataaagaactgaaggcgtttcaacgcgttcctctggaaattggccaagaagcacgtgttagcattaacctgccggtgagcaattgcaccattgtgaacgctgaagaaaagcgcgtcgtcgagccaggggattttgatgttatggtaggccattccagcaaaccggatgaccttttgccggtaggctttaccgtagttgcggaaaatcgctga

SEQ ID NO: 439 - DNA, 1533 bp, Artificial Sequence
  6xHis UPI000591CED9
atgcaccaccaccatcatcacgaaaatctttacttccaaggcagcatgtatctgccggcgtttgaagcagctgtcgaagcgggcgttgctaccttaatgaccggtttcaacgatctcggtgggaccccgacgacgagtaccaaagacttgattaacggctggctgaaatcggataaaggctttgatggaatggtggtttccgactggggaagcattgccgatctggaatactttggtgtatcagcagacaagaaagctgcggccaaaaaagcgctcctgtcaggcgtcgatatggcgatgaccaacgaagcgtacgaaggacatcttgaaggcctggtgtcgttggaaccggctttagaagacgccattaatgaggcgacctcgcgcgttctgcttgccaagtttaaggcgggcctgttcgagaaaccgtatgtggatcctaatgtgcataaacacatcctgcgtcacccggaacatattatggatgccctggaactggccgaacaatcgatggtgctgttaaaaaaccgtgataatctgctcccgctgagcgataaagatctgaaggttgcggtgattggaccgcatgcgcacagtaaacgtcaacacttggggagctggtgtctggatggaaaggcagaagatgtgacatcgatcgcagagggtaccgcgaaaatcgcgccgaatattgatttgctgacggaagagagctcattctccgatgaaatggtggaatgcgcccaccgtgcagatgtagtggtgttatgcgtgggagaatctcaccgccgtaccggtgaagctcgtaacatcgcggagttgaccctgccgccaggtcaagaacagttaatagaagcgatcgggcagaccggcaaaccgctaattgtagtacagtgtaccggtcgtccagtaccttcgccgatgactgaacgttatgccgacgcgttgttacaagcgtggcaaagtgggacggaaaccgggttggccgtagcccgcttactttttggacaggccgtgccgtcaggtaaactgagcatgaccgtcccgcgctctactggccagataccgatgtattatgggcgtaaacaaatcggcaagaaacgggactttctggattacatgccgtacaaagacagtccggagagccccctctatccgttcggtttcgggctgagctatacgcagttttcatatcgtaatcttagtgtcgagcgtagcaccctgggcacagaacagacccaaacagtaagtgtaacagtggaaaataccggcggcgtcgcagcgttagaaactgttcagtgttacattcgccgtaaagccgccactaccacccgccctttacgggaactgaaagcgttcgaaaaagttcatctcgcacctggtgagtctcgcgtggttgaatttgaactgacgccgaagcagttgtcgtactatggcgctgagaagtgttttaaaaacgatgaaggtgacattgaggtatttgtaggcagcagcagcgaagcgaaacactccgtgtcttttgcagtcaaagattga

SEQ ID NO: 440 - DNA, 1986 bp, Artificial Sequence
  6xHis UPI00063B706F
atgcatcaccatcaccatcatgaaaacctgtacttccagggctccatgtcggcgtataacaaagttaacggtattcacgtgtgcgaggatgagcgctttttgcgcgaaattctgcgtgaggaatggggctggaacggtcttgtaatgtccgattggttcggcacttacagcacatcggaagcaatcaacgcgggcatggatcttgaaatgccggggcctagtcgttggcgtggtgaacaggcgtttgttgcggcgtcgagcgataaatcgcgtccgaccgcgctggatgattgcgcgcgacgcgtgctgaatcttgtgaatgaatgcgttcgtagcggcattccggaaaatgccccggagctggcacgtgatactcctgaaactacagaattcttgcgccgccttgcggctgaatcaatcgtcctgctgaaaaacgatggtggcattttaccactgaaatcacataagaagaccctcgttgtgggtcccaacgcacgacttgcgcgatattgcggtggcggctccagcgaactgatcccgtatcacgctgtgtctccactggaaggtatccaggaaaaaattggagcagaaaacgtgaccttcaccattggtgcacacagtcacaaggacctaccggacattgctcgactgctgataccaacgctggactctaccgaaaacggcgttacatttaccccgtttaatgatgctccgggcgtgaaagatcgtaaaccggtggaagagctgctggtgcgaacatcttcaatgatcctcttggactacaacaacccgaaacttgcccagctgtggtacgcggatatcgagggctatttagccgccgatcgtacgggtgaatttcagtttggcctgtgcgtatttggcgccgcccgcttatacgtcaacggaaccctgctaattgacgctaccgaggttcagaaacccggtaatgccttctttggatgcggcaccgaagaagttaaagcaacgctcccgttacagaaaggtgacacttaccatgtgaaagtcgaattctttagcgagccgtttagcaaactgacaccgcaggcagtcaccttcccgaatggtgctgttaaagtgggcggggcgtgggtgattaaccatcaagaagaaatacgttgtgctgcggcgcttgctagagaacacgaacaggtggtgctttgtatcggcctgaataatggctgggaatcagaaggttttgaccgcgatgacatgaaacttccgccgtatctcgatgatctggccgcggctgtcttagaagcgaatccaaatactgcggtggtcgttcaatcaggcgcccctgttgagatgccgtggctgtcaagcacgagtgccctgttacaggcctggtatggcggtaacgaggctggccacggtattgccgacgtactgtatggtgacgtaaatccttcgggaaaattaagcctgtcgttcccaaaaaaaatcgaggataaccctgcatatttcaattttcgttgtgaagcgggtcgtgtgctctatggtgaggacgtttatgtggggtaccgctggtacgaaggactgaaacgccctgtgaactttccgttcggctttggtttgagctacacgacgttcaagttcgaagatctgagtctgaaaatggacaatgaaagcttgaccatttccgtgcgcgttagcaacacaggaaacgtagatggcgcacaagtgttgcagatttatgttagccacaaaaacccgagtatccgccgtcccgtcaaagagcttaaagagttcagcaaagtgttcctcactaaaggcaccaacaaaacgattagtctggatatcccgctgaagtatgcgtgcagctattttgatgaacgccgcgaccagtggatttttgagaaaggccaatataccgtcattgtgtccgacagctctcgcctggaaaccggcaagtacgtggaagcggactttaagatcgataaaaccatctggtggagcggcatgtga

SEQ ID NO: 441 - DNA, 2577 bp, Artificial Sequence
  6xHis UPI0006C04F59
atgcatcatcaccatcaccacgaaaatctatattttcaaggcagcatgaaaggtgcgcgaatgcaggatcgcgtggaaaccttgttacagtcgctgaccttagatgagaaaattaagctgcttgcgggcgcggatacctggcatacccatgcgattccgcgcctgggcattccagcactgaaggtcactgatgggcctaacggcgtgcgaggtactcagaaagatactcgcagtcagaccagtgcgagttttccagtaggcacggcaatgggcgccacttggaatcctgatctggttcgcgagataggtgaagcactggccgaggaagtcaaaaccaaaggcgcgcacgtcctactgggtccaacagtcaatatgcaccgtcatccgctggcgggtcgcaactttgaatgtttcgcagaagacccctatttgatggcccgtatggcagtagcctatattcagggtgtgcagtcgcaaggtgttggggcctgtatcaagcattacgtttgtaacgaccaggagtttgaacgattctcgatctcagcggaggtggatgaacgtacccttcgtgaaatttaccttcctccgtttaaagcagccgtccaagaagccggtgtatggaccctcatgaccgcgtacaatcgtgtcaacggcgtttacgccagcgaaaactcccatctgtttgatattctgaaggatgaatggggctttgacggactggccttgagcgattggtacggcacctatagcgaccgtgtgccactcgaacgtcttgatctggagatgccgggtcccggtagatggatggcgcctgaaaaagttcgtgcggcgctggagcgcggcgagattaccgaagcggacattgatgacaaggtccgccgcctgctacgtactttggagcgtgtaggcgcctttgaagacagcgcgccaaaggaagaacgctccgtcgataatccgcgtcaccatgaaattattcgtcgcgcaggccgtgaggccattgtgctgctgaaaaatgaagacaacgttctgccgctcgatgctagccgttttccccgtctcgcggtaatcggccgtcccgcgaccgaagtttcttttcagggcggcggtagcagcgaagtgaaccctcactacgtggtccagcctctggacgccatgcgtgaacgttatggggaggcgtttcagatgacatatgcgctgggcccggctttctaccgtaatttcccgcttttagatacccgtggcctgcgtgctgaggacgggaccccgggcaaagtaaccgtgcgtcagtatgataataccgaactggaaggcgagccgtctaaagtatttctggcagaaggtacccaattagcttggtttggcgaacagatctcggaatttgatcttcgctcattcagcctaactatgagtggtacgtggaccccgcccgttagtggcacttacacctttagtatggccaccgtggggcgtggtcgttttgaattcgacggaaaaacactgttagactggtgggaatatatcccggaggagcagccgcagaattttgatggaatggtcagcgtcccgtggcgtcaggaagaagtcaccttagaattagaggccggccgcgagtatccgtttcgtgtggattttgctgtggttcccggcggtcgttggcggacgatccgtctaggggtattaccgccgcagcctgcggatcccattggcgaagcggtagccctggcccgtgaagctgatgccgcggtggtgtttgtaggcctgaccccagagtgggaatctgagggctcggaccgtgaatctatggatctaccaggcgagcagaacgaactggtggcgcgagtagcagaagccaatccgaataccatcgtgatcgtgaatgcaggcagcccggtgcacatgccgtggctagacaaagtaaaagcagttctccaggtatggtacttaggtcaggagatgggtaacgcaattactgacgtgcttttcggtgaagccgatcccggtggtcgactgccgacgacttttcccaaacgactgcaagactccccggcgtatattaactacccaggcgaaaacggtagagtgtactacggcgagcgtctgtatgtcggctatcgctactacgataaaaaagaaattgaaccgctgttcccattcggtcacggtcttagctatacgacgtttagctacgatgcgctcgaactggcggccgaccaggtccgcgtaggtgagggcgtggatgtgcatgtaacaatcaccaatcaaggggcccgtcgtgggcaagaggtggtgcaggtttacttgcatgacgtggaatcaagccttccgcgtcctccgaaagagctgaaaggctttgccaaagttaccctggaacctggtgagacccgtactgtgacgatccatctgcgcccggatgccttcgcgttctatgatgataaacgcggtgcgtgggtcgtcgagccgggtgcatttgaagtactcgttggccgttcggccgcagatattcgtcttcgtgcccgtctggacattgttgataaaacgacggaggcactggaggcgggcaatgttctagcaggttga

SEQ ID NO: 442 - DNA, 2448 bp, Artificial Sequence
  6xHis UPI000197E031
atgcaccatcaccaccatcatgagaatttatacttccaaggctctatggagaaatatcgtaacaaagatcttcccgtagaagagcgcgtcgaggacttgctggatcgtatgacgttcgaggaaaagattgatcaaatcacgtgtctggttaccatcgccgacgacattccggaattcgaaaactatatcccaaacggcatcggcaatgtgggagccttcacagtggcagatacagtagagccaattgtagagtatgcggacaagcttcagaagtatctggtaaatcatacacgtttgggtatcccggccttgattcactgcgaggcctcagcgggtgcacaatttactgaagcagacgtctttcccagcgcaatcgcgcaagcaagcacgttcgatacggaagttgtcggggagatgaccgacatcatccgcaaacaaatgtattacgtgggtttccgtcaggcactgtcgccagtcgttgatatcacccgcgacccacgttggggtcgtattaccgaaacgtacggggaagacgcggccctgacgtcggccatggcatcagcatttgtgaagggcattcagggcgatgaactgaaagagggcgtgctcgccaccgcgaagcatttcgcaggccacgggatcaccgaaggtggtctgaacatgggtcgcaacattgttagcgagcgcgatatgcgcgaaatccattgtaagccctttcaatgtgcaatcaccgaggctggtttaaagtccgtaatgaattcatattgcagtgtgaacggagagccagtggtcggctcaaagaagatgttgaccgatattctgcgtggggagatgggattccaaggcttcgttgtatcggattacctttctcttgatcgtctggtggatccgtttgcagtggctgagaactttgaagaggctggcatccgtgcaatccaggccggcttagacgtggagtacccccgttccaaagggttttcgtacaagatgaaggagtcaatcgagtcaggacgtctgagtatggatatcatcgatcaagctgtgcgtcgtgttctgacccaaaagttcgagttgggtcttttcgagaacccatatcccgatcttgagaagctgaagaagtaccttcatctgaagtcggcggacgaattaaatgaaaagatcgccgcggagtcgtttaccttattgaagaatgagaataagacgttgccgctctcgaagaagatcaagaaaatcgcagtaattggtcctcacgcggacaatatccgctcactgttcggcacatttagctacccggcagtcctcgacatgacaatgagccgcgaagaggatggccaagagttcgaagaacctggtctgattatctatgacgtggaacaaaagtacaagggcgaaattcgcgaagttagccctcgtgtcaatcgtaagattcagaaggagttcccgaacagccgtaccctgtgcgcggcattaaaagagtatctgcccgaggccgaggtggtatacgcacaaggtattaactgtagtggggacaacacgggtggcatggaagaagctcttcaggtggcggctggagcagacgtaatcctgctgacgatcggtggcaagaacggctggggagtgactagcactgtgggtgaggggatcgacagcacggacatcgaccttccaggacgccaagaggagtttgcacgtcgtgtctatgacctgcacaagaagactgtggtgttacattacgacggccgtccgctctcaaatgagttcgtagcgagtcactttgacgcgatcatggaagtgtggcaaccaggtgagtacgggtcgcaagcgctctgcaaggtattatttggcgagcagtctcctagtggccacttacctgtgactgtggctcgtaacgtgggccaattaccagtgtactacggcctgccccgcggcagcggatatgtgagcgcgggtcacaccggcatgattcgcaataagaatggctatatcaacgatacggcggagccgctgtattacttcggacatggtctgtcctataccgaatttacttatagcgacttgcagaccgacaagaagaatatcaacccggacgacactgtgaaggttaccttcactgtgaagaatacgggtgagtacgatggagccgaggtagcacaactttatttctcagacaaggttgcttcgatggtccgtccgaccaaggagctcgcgggctttgtccgtattttcttaaagaaaggtgagaagaagaaagttgtgtttgaaatcaaggtatcgcaattcgcattcttggatgaggagatgaaatggaaggtggagaaaggtgagatcgaattattagccggttcctcttgtgaggatatccgtttgtccgatatcgtatccatttcagaggacgactatatcgacggaaagacgcgcggtttctacgccaaggccgtagtctgttaa

SEQ ID NO: 443 - DNA, 1227 bp, Artificial Sequence
  6xHis UPI0007DDBAB3
atgcatcaccaccatcatcatgaaaacctctattttcagggttcgatggatggccccggcgagattctgtccgctgatacaggtggtgcacgcgcaccacaacctgaccctcgtgatcttgcggcacgtttaccgcgtgattttgtagtcggtgcggccaccacggaaccgcaagccggtgctgccgcggatagacatgatcgacatgaggaagatctagcgctgctagatggcgcggggctggacggctatcgtttctcagttagttggcgtcgcgtgcagcccacaggcagcgggccagcggatcctgctggccttgatgtatatgaccgtctcctggaccgcctgttagagtctggcattcgcccatcggcgaccttatttcatcgaggcaccccgcccccgttagaacagcgtggtggatgggcttcacgcgatactgcgaagcgttttggtgaatatgcggcgctcgtgggagagcgcttgggcgatcgtgttgtggattgggtaaccttaacgggtgcggcacgtgtcgaattagacggtcctcgtccgggtgtgactggccctgacttggaacagattcgtcgggccggcagtgttgcacgtaccgtactgttgggtcatggtttagctgtacgtgcgttgcgcagcgttccggtgcgaggccggattggaatcacacagtctggaccccctctcaccgatgatccgcaagaccccgcaacggcgggtctgctgggcctcttacaagaccgcttattggccgacccggtgttattaaggtgtcgtcccgagttgcccgcaggattaccgccaggtatgcgccgtcgattacgccgagcaacccgtatgtcccgtaaagatctcgcgctggtgggagcgccaattgatttttatggtcttgaccacgaactgccatctcctgttgccgccgatccaggtggtctacgtcgcaccgcggaagatctggccggtcgatatggccctcgtctgccgcccgttgtgattaccgaaatcggtgcagggctgccggaacctgttgctccggacggagttgttgatgatcaggaccgtgtagcgcacttagcagaacatctggacgtagtggccgatttagcacgcggagatgtgccggggtttaggttagaagggtattatgtccgtactcctcgttcaagctatggctgggtaggtgaattacaggccgcacgaggtcgaggatga

SEQ ID NO: 444 - DNA, 2655 bp, Artificial Sequence
  6xHis UPI000822F7EB
atgcatcatcaccaccaccacgaaaacctgtatttccagggcagcatgaagtcgaaagaggctattgaacgccacatcaaagaactactgtcggagatgacggtggaagagaaactggacgagttggatcctaatattatgggcattgattgggaaaagattgaagaaccgatgcgtcgtgagtgcctagagaagttagagaaacgtcgcgcagacgcacgtgtgtataacgcgctccagaaatatgcgaaagaacagacacgcctgggaattcccttcctctttcacgaagaagctctacatggtctgcaccgccgggatgccacgatttttccccaacagctgaccctggcgggggcgtttgaaccggcactctgcgaagacatgggtcgcatggtagcggcggaaacccgcgcaaaaaatatccatgaagtgctggcgcccgtcctggatctggcacgcgatccgcgttggggtcgcaccgaagagacttacggggaagatacatatctatcgtccaaattgggtgcggccgtggtacggggtctacagggcgaagatctggccaccgatcatactgttgcttcagaactaaaacattatacgggctacgggaacccaataggcggtctgaactgtgctccgaccacgatgggccgccacgatgtgttcagttattgtatgccggtgtttgaggaagcctttgttaaagcaggtgctactgatacaatgtgctcctataactccattgatggttttcctgtggttagtgaccatgagattctgaccgatgtgctgcgcggaacgtataaaatgccaggctttgtgcgctcagatatgaccgcgatcatcatgcagcacaccgcacaccacagcgcggctaccccgaaagaagccctgcagaaggcggtgaaagccggtgtcgatgtccagtttgctgattatagccatgaggaatatcgccgcctgatgaaggaaatgcttgcggatggtagcattacgatggaggaactcgatactagcaccgcccgtgtgttacgtgtgaaagacatgttaggtctgtttgaaaacccgtatgtcgacgaaaccctggaaagcaaagtcgtacattgcaaagagcatcaggataaggcactggagatcgcacagaaaactgtcgtgctccttaagaacgaaaacaatatgctgccgttaagccgcagtatccgtaaaattgcggtattaggcccgaacgccaatcttccagtcatgggcgactattgcatggaaccagactaccacgcggttacgctgctcgaaggcatccgcgaggtcttaggtgttccggcagaaaatgtggaaaccgccgcgaatgcgagccatcctgagatcgtttatgataagggctgcaatatcctgggagcggaaattaaaccgttagagcgttggtggttcaacgccaagccgcgaccggcggtcggcattaccgaaattgattacggctttaccgccgagtattttaatggcgcggactttagtggcgaaccggtgcttactcggttagatagtcagataaacttcaattggatttaccacgctccggatgacaaagtagactcccgtcagttttgtgtgcgttggactgcgaccatgtgtagcccgaaatcgttcgagggccgtatcggattgagcagcccggattcaatgcgcctgtatattgacggtgaactggtgatcgatggctggggtgaagacaaagaagcgtcacagatggtcccgtttttcttcgaatcaggccgtaaatatgatgtccgtgtagaatttcgtaatgatgcacggggcgtgcgcgtgattttcggttatgatcatggcgaagaaacgattgaccgcgcaatccgttttgctaaagagagtgatctagcgatagtggcattaggagactctacggaaaccagtggagaaaacttcgatcgtactacccttaacttaccggggaagcagctggattttttaaaagcagtttacgaaacaggtactccggttgtgctggtcatgaatacaggtcgtccggtaagctgtacgtgggaacaggaacacattccggctatacttcaagcgggcttcaacggcgaaaaaggcggcctcgcgacggcacaggtgttattcggtgatgttaacccgtcgggtcatctgacaatgagctatcctcgtagcgcgggccaaattccctgccattattctcgcaaaccggcgggaggccgcaaatacgttgaaatggattggaatccgctctacccattcggttacggtctgagttataccaccttcagctttgagaatttacgtttatccgcatctgaaatacatggcgatgagagcttggaagtactgctggacgtgaccaatacggggagtcgagccggcgctacagtggcgcagatttatgtggatgaccactacacctcagttgtacgtccgattatggaactgaaagggttccagcgtgttgagttggaagctggtgaaaccaaaaccctgcactttacccttggcttcgatgagctccgtctactggatgccagctatcattgggttgtggagccgggggattttaccgtactggccggcgccaatgcaggggatctgccgctgcgcgctgactttcgtgtggtgtga

SEQ ID NO: 445 - DNA, 2649 bp, Artificial Sequence
  6xHis UPI000878EB40
atgcatcaccatcatcatcatgaaaatctctattttcaagggtcaatggatgaaggcttgatcaagaaaatccgacgcaacatgtcgttagaagagatggtgtcgttgtgctcgggtcgcactgattgggaaacgatgggctactcaaagtacggcattgaaccagtgttcatggcggatggtccacacggcatgagagttattgaaaacgacggcgcccttggtattccacagggcaagccggcaacctgcttcccaccggccgtgctatccgcatgctcgtgggacgaaggtctgctcgaattcgtgggccgcacgatcgccttggaagcacgctcgctgggagtggatttaattcttggcccgggtattaacatcaaacgtagccccctctgcggtcgtaactttgaatactttagcgaggaccccctcttatcagggcgactgggaaagtcgtttattctgggcgccaaagatcacggtgtagggaccaccgtgaaacattacttggccaacaatcaggaaacacgccgcatgacagtggatgagaagattgacattcgtgccctgcgtgaaatttatttaaaaccgtttgaaattgcgatcaaggaagggaaaccgatggccgtgatgtgcagctataacagcattaacggcaagtttgtttcacagagcaattatttcctgacccaacttctgcgtaatgaatgggggtttgatggtattgtgatctcagactggggcgcggtgtatgatcgcgtgagaggtgtactcgcgggcatggacttggaaatgccgggtaacgggggcgtcaataaccagaaaatctttgaccggattaaagagggaaaactgaaagtgactattctgaatgagatggtagaacgtttaattcgattttcgtttcaggcgaaagaaaaccgtcgcaactacgcaaccaaccttgaaatagaaccgaaagggcatcataaaattgcccagctggccgcagtggaaagtatggtcctcttaaagaatgaagcatgcattctgccgattgatcgcacgaagattaaaaaactagccatcattggcagcatggccttcgacccacgttaccagggcagcggttcgagtaagatcaacccgtatcatattgacagcccgtatgaacgtattaagaagctagtcggggacgagatccagctgtttccgcatcagggctacattcacgatgaagtggttgaacagatccaccttgcagaacaggcggaggaggtggccaaaaatagtgagatggctttgttgttcgtcggtctgccggaccatgatgagtctgaaggatatgatcgtacccacctccatctgccgcaaaagcagctggcgctgattaggaaaatttgcaaagttcagccgaaaacagtggtcattgtgcagaatggcggcgttgttgatatgtcatgggaacaccaaccgcaggcaatagttgagatgtttttgggcgggcaagcaggcggagatgcgattgcgaaactgttgtttggggagaataacttctgcggtaaattggctgaaacaatccctatgcgcctggaagataccccggcgtacattaatttcccgggcatccacgacgaagtggtttacggcgagagcatttttgtaggctatagatattatgatttcactaaaaagaaagttcgatttccgttcgggttcggcctgagctataccgattttaactacgaaccgatcgatgaaccggcgctgaccatcgatgcagagaagatggtcactgtgcgctgccgcgtaacaaactccggcgttatgaatggcaaagaaatcgtgcaactgtacacgggtaagtcagataccgcgattctgcgtccgttacgcgagctccgcgcatttaagaaggtttttattccggctggtcgctcggccgaagtctcattcgaattgggtctgtcagatttctgctactataacccaacaacgaagagctgggaacatgaatccggctcacaccagatctatattggtagcagcagccgagatctgcctatcgtctatccggtgcaaatcaccaaggatttgatccacccaatcaatccgttgagctacctgagcgattttgaaaagaccgagcgtggccagaccattctcaagttacttcttagcggcttcgaagagattatgggtgacgatcaaacccgcgaagacgatttttttatgactatgttagccaataccccgctgcgcaagctggttgaatttagcaacggtatatttacggaagaatgtattgacaaaattattgaactcgttaactcggaccagagcttggagggaatcacgtttgagaaactggtgaattgcacggagaaaaaaaagggcttttttaaaagtctgttcggcggcaatgaggaagaatacctgtgcatccattcgaaagtcagggatttggtggaagatgaagatgtgatgcagattctcaggaattacttcggcgatgaaaccttcgagagcgactacctgcagatggcaattaaaatgggcatctgtttcgacaaagcgcagaagctgctcccggatgacttcttttccgacgagaaacttaaagatatcgatcgtgatctgaaagttctggccaaactgaagaagaaatga

SEQ ID NO: 446 - DNA, 2391 bp, Artificial Sequence
  6xHis UPI0009D0A2C1
atgcaccaccatcatcaccatgaaaacttgtatttccaaggtagtatgaagttaaaacagcgcgtggcgatgctcacgggtaaaaacgtgtggcagacgttcagtcacaaaaaactgaaaattaaaagcattatgatggccgatggcccgcatggtctacgcaaacagacagataacaacgataatctagggctgaattcgagttatccagcaactctgtttccaccggcgtgtgcggttgcgtgtagctttaacaaagacctggcgagcaaaatgggtgaagctatcgccaaggaagcaaaagcagcggatgttcaggttgtcttaggtcccggcgtgaatatcaagcgcaatccgctgtgtgggcgcaactttgaatattactcggaggacccctatctctcaggaactatgggggccgcgtggattaagggtctgcagtctcaaaacatcggtgcgagtttaaagcactttgcagttaataatcaggaaacctatcgtttcaatatcaatgcagtagtcgacgaacgtgcgcttcgcgaaatctatctgaaaccatttgagattgccattaaagaaaaacctgccaccgttatggcggcctataacaaggttaatggcgtttatgccacagagagcaaaaagctgttaaaagacattctgcgaaaagaatggtgctacaaaggcgtcacggtatcggattggggcgccgtatcaaatcgtccccagtctctattacagggactggatctggaaatgccgtcatccggaaactacaactcgaaaaaattgattaaagcgctgcaggacgagtatattattgataacgacattgatgcctcagtgagccgtatgttgaaattggttgacaaatatcagaacaacttggaggagcctttcgataaggatgctcatttcaagttagcgcagactattgcgaccgactctattgtcctgctgaagaacgacggcattctgccactgaaaccgggtgataaggttgcagtggtcggtgcgttcgctaagtcgccgcgcatacagggtggtgggagttctaacgtgaatccaattcgtgttggtaatgttatcgatgaaatcaactattataccgacaactacaagtatttccgcgggtatagcatggaaaacgatggttacgatcagaaactgattgacgaagtggtacacgaggcgttattgttcgacaagattatcatcatggtcggcctcccggaagagtatgagaccgagggggtggatcgccagcacatggacctgcctcatggccatctaaagctgattgaagaaattgccaaagtgaacccgcatattattgtgaccctatctatgggcgcgccggtcgcgctgccgtttgaaaaagaggtgtcagcaatactggcgctgcatttgctgggcggcgcgagcgggaagcctgttctggatattttatatggtaaaacttcaccatctggtcgcctggcaacaacgtttcccctggatataaatgatgaccccacgacggcgaattttgcggatggcaaccatagcgtttggtatcaggagagtctctttgtcggctaccgctattatgaaaccttcaagaaagccgtccgttatccgtttggctatggattatcttataccaccttctcgtatacggatcttcaagtgtctattcctgaaatccgcgtctccggcccgattgaggtgaaagtgaaggtcaaaaataccggtaagcgcccgggctctgaagttgtgatgctgtttgttcaaaataataccagcccggtctttaaaccactgcgcgaactgcgcgccttcgagaaagtctacttagagccgaatgagcagaaggaagtcgtgttcgtattgaactaccaggattttgcttattatgacgttgatatgaagacctatcacgtggatcgtggtaagtataaaattcaaatctgcaagcacgcgtcgaaagttattctggagaaaaccgtaaccaagcaggataacgaaattggcttcaacagtccgtatccgtcggcgtacaatgataaagaataccacattgagaaggaagatttccagaaacttctgggccgtttactgcctccaaaatcaattattaaacaccgcccgtacaccatggactccacgttggaagatgtgaaacatacgatcctaggcttcatcatgtaccgcgtggtactgcggaaagccgcgaaactgtcaaaacgcagctcaaatgattggatgcgtcaagcgatgaaaaaaaccttagcccaaacacctttacgtgtgattgcgacgatgtccggcggtgccatcagcttgattcagatggaaggcctggtggatctgatcaactttcgtattatccgaggtttgggcaaaatctga

SEQ ID NO: 447 - DNA, 2502 bp, Artificial Sequence
  6xHis UPI0009CB8A73
atgcaccaccatcatcaccacgagaacctgtattttcagggctcgatgaaaaacaacaaccaactgatcacgcgcatgctttcgcttctgacactcgaagaaaaaattgcgttagtggcggggaccaacttcatgtacaccaatgctgtaaaacgcctgaagattccatctattcgtatgtcggatggcccgcatggcctgcgcgtgcagggcgaggtaaacaaaaacggcgtctcaaaatctgaaccggcgacttcattcccgacggcgagttgtagcgcaaacagctggaataccgtgctgttagagaagatgggtcgtgcgatgggtaaagaagcatcccattacaacattgacgttatcttgggcccgggcgtaaacattaaacggaacccgctgtgcggacgcaactttgagtacttcagcgaagatccgtttctgaccggtcgcctcggggctagtgaagtgacaggtatccagaaagaaggaatcggggttgcagtcaaacatttcgccgcaaacaattcggagaactatcgattcatgggcgactcgattgtggatgaacgtgccctgcgcgaaatctactttcgccattttgaacatatcgtgaaaaccaccaagccgcaaagcgttatgtgcgcctacaataaaattaacggtgaatactgctgtgaaaataactggctgctgaacgacgtgttgcgtaaggagtgggggtttgaaggcctcgtaatgagtgattggggtgccacccatgatcgcgtcaaaggtattaaaagtggtctggaccttgaaatgccgggtgggacgaccatctgccgcaagtggttgtatgacgcaatcaatgaccattcccttaacatggaggaacttgacaaagccgtctataatgtccttaacctggtattcaaacatcaagacaaagagcgccttatggaaatcccgtgggatgaacatcaccagctggcaaaagagatagccctggaaggcgcggtattgctaaaaaataatggcgcgcttccactgcagaaagacgaacgcattctagtgattggagagctatttgaaaaaatgcgctatcagggcgcgggcagctccctgattaacccttacatgcgcacgacggccaaagaagtattcgacaacgaaaatatcaactatgaatacgtgaaggggtaccaagaaaacaaaattgaacccgatcaaaagctgatagatgcagctatcgacgtagccaagaaataccataaagtaatcctgttcctaggtctgaccgattatatcgaatccgaaggtattgaccggaataatctgtccctcccggctaatcaactggcgctgatcgacgcttttattaaacttgaaaaggagattgtggtggtactgtttggcggctcagttattgaactgccgttctttgacaatgtgagcgccatactgaatatgttcttaccgggccagaatggtggcgaagcgacctatgaattattatatggcatcgcgaatccgagcggcaaactggcggaaacgtggccgtacaagtatagcgatgtccctttctatgaagaatactccaaaaatgaaaacgaagtctataaggagtcgatctatgtgggctaccgctattacttgacggcggacaaggaggtccgcttcccgttcggatacggcctgagttatacaacgtacaaatactcggccctgaacgttactaccgaggataacttcttgaacgtaagtctggtcgtgaccaacaccggtaccattaagggtaaggaaattattcaggtgtatgtagcaccgccgaaaggcaatacccacaaaccgacccgagagttgaagggcttcatcaagatctcactggagccgaaagaaagcaaagaggtttcaatcaaaatagccatcgataatctgacgttttgggcaccgaaagagggtcgtttcgtgctggagaaaggcgaatacacggttgagattggtgaaaattgccgcgatattgtgttaaaagagacgatcgctctgggcgataaaattgtgcaggcccaatattctaataatattgagaaactgtataataaactgaatccgcaaaagatcagcaatcccctgtttgaggagatggccggtttaaaaatcccggcgctacctccgagcaaacccatcacgctggaaagccgttttaccaacctgagtaagacctttctgggtcgcatcttctatcgcgcggttctgaacgtcgcacgcaaagaaatgaaagaggccaaaaagatgatcgacagcccggagaaagaaaaccgcattaaaggcgcgttttttctgaaacagatactcgaatctaacagcctgatttcgctcagcatgtccagcagcaatcatatgccgtataacttcgcctgtggctttcgcgatattagtaacggcaaggtttttaaaggcattaagcagtttatgaccaaaattaaggcccctgatctcccatcgaacaaagaagaggagtga

SEQ ID NO: 448 - DNA, 2160 bp, Artificial Sequence
  6xHis UPI0009CC90AF
atgcaccaccatcatcaccacgaaaacctgtatttccagggcagcatggaggacaaaattaagaaaatcctgggcgaaatgagcattgaggaaaagatcgcgcaattgtcatgcgtcgaacgtggtactcttgtcgataacgaaatatttagcaaacagaaagcatgtgacgttctcaagaacggcgctggtcatattagcccgatacttcgtccgtatgatccgtctaacggcaccaaaattgcgaatgagatccagaagatagctaccagtaccggaccaaaagtgccggtgatcattcatgacgaatgcttgcatggctgcatggcgaaaggctccacctcgttcccacaggccatcggtttagcgtcaagctgggatccggacatggtggaaaaaattgctcagattatcggtaaagaaacccgcgtgcgcggtattcatcaagccctgagtccgactattaatattgccagagatgcgcgccacgggcgggttgaggagacctatggcgaggatccctatctcacctctttaatggcggttgcgttcattaagggcttacagtcgcagaaagtaattgccaccccgaaacactttgctgcggacttcgcaggtgatggcggccgtgatagctccgcaacctttttttcagaacgcatccttcgtgaggtgttttttccggcgtttaaagccagtattcagcaggcgaaggcgtggagtctgatggccgcgtataatagtattaatggtattccgtcttcgtcaaataagtggctgttgaccgatgtgttacgcaaggaatggggctttaacggtttcgttgtttcggactacggtagcgtgtggggcatttacggcaatcaccgcgtggcagattcattagcaatagcaggtaagctggcactggaagccgggctcgatattgaaatcccaaactcgccgtgcttcagcgaaatgctgaaattggcaatggaaggtaaagtgtctcagagcgttattgatcaggcggtggaacgcgtattgcgcggaaaattctggctggggctgtttgaaaatccattcagcaaccctgaaaaagcagaaaagatttgtgattgtgaccaacatcgccagatggcgctagaagcggccgagaagtgcatggttctgctcaaaaacaacggcattctgccgctgaacaaagatattggtagtgttgccgtgatcggcccgaatgcgaatattgtacgcctgggtggttatagcggttttggtattaaaactgtgaccgtgttcgaaggtatcaagaataaaattagcaagcgcagcaatgtctattttgcggaaggctgccgtgtgaacgatagcagcaagtacggttttagtaaagcgagtagcatcgcatcgaaagcagatgtggcgattgttgtggttggtaacagctcagaaacggaaggggaaaatcgagaccgctgtaacctggatctgccgggcgtgcaagaagacttgattaagacgattgcggataccggcacgccggtagtggtcgtgttaatcaatggctcagcgattactatgagtcgttggatcggcctcgttgacgcggtcgtggaagcatggtatcctggagaagaaggtggtaacgctatagctaatgtattgttcggaaattgtaaccccggcggcaaacttccgattacatttcctgtttttacgggccagctcccgctgtattacaaccatctgccgtgcgtccgtcgtctggactacgtggagattcgcgggaatcaaccgatgttcccttttggctacggcttgtcttataccgatttcgaatacaaaaacctgaaaatcagtcccgaagaatacagtggtaagggcaacatcaaactcagcgtggaggtagagaacaccggcaagtacgaaggagatgaaactattcagctgtatttacgcgatatagtatccagcgtgattcggccggtcctggaacttaaacggttcaaaaaagtacacctgaaacctggcgagaagacaaccgtagatttttcccttagtattgaagatttaatgtttctggacgaaaaacttaactacgtcatcgagtctggaacgtttgaagttatggtcggtaaaaactcgatggagggcctcaaaactacctttgaaataaaatga

SEQ ID NO: 449 - DNA, 2244 bp, Artificial Sequence
  6xHis UPI0004D8E473
atgcatcaccatcaccaccacgaaaacctctacttccagggctccatgaaaaagattatcggcgtgattgcctgcggcctgtttttgaatgcggcagccgtgagctcgcaggttacagataaggaaaaggtgcaaatggagaaacgtattgagaaacttatcaaaaaaatgactctggaagaaaaagtcggcctgctccacggcaacagtaaattttacgtggccggagtggaacgcctggggattccagaatggtcgttaagtgatgggcctcatggcgtgcgcgcggagatcaaccgtcatgattgggcgtacgcgggatggactaacgatagcgcctcttatttcccgaccggcactgcgtttgcggccgcgtggaatcctgagctggcgtaccgtcgcggggaggttctgggagaagaagcccgttggagaaaaaaagatgtgttactgggcccgggcgttaacatcattcgtagccctctctgtggacgtaatttcgaatacatgagtgaagatccgtatatgaactcggtgctggcggttgcgtatattaaagggcttcagtcgagggatgttgcgtgcagcgttaagcactttgcggtaaataatcaggaaacgaatcggactactgtagatgtggagtgctcagaacgcgcgcttcgtgaaatttacctgccagcgtttaaggcagcggtgcaggaaggtggcgctttaacagttatggcggcctacaacaaatttcgtggcgaattttgtgccgaaaacaactatcttgtacgcaaaatcctccgtaatgagtggggctttgacggggtgtatgtgacggattggggcgcggcacatagtacagtcccgtctatggaggcgggccttgatctggaaatgggtaccttaatcgataagtatgaagactggtattatgcgaacccgttaattgaagcggtaaaatccggcaagatcccaatgtctctggtagacgagaaagtgggcgatgtgctgcgcgtgatgatcaaaactaacgttctggacccgaaaaaacgctttggtccgggcagcatgaatactaaagaacatcaacaagccacttacgatgccgccgcggaagcgattgttctcctgaagaatcagaacaacctgctgccgctggactttagctctattaaaagcctggccgtgattggtgacaatgcaacacgcaaacactcaaacggtggtctttcgagcgaaatcaaggcggtttacgaagtgacgccgttagaggccctgcgtgccaaatggggcgacaaggttgatatccgtttcgcccagggttacgaaaaactgtcaactttcgttgaaggttccaacaacggccagtccagtggtacgtttagcagtaaaacacaagaatctgacgcactactgaaggaggcggttgaagtcgcccgaacttccgatgtggcgctccttgtgtgtggcttaaaccatgactacgataccgaatctttcgaccgtctgaacatggacatcccgtatggccaagttgaactgattcaggaagttgtgaaagccaatcctcgtaccattgtcgttatgattgctggttcgcctttaaacatggcggcagtagacatttgtagcccggcgatagtgtgggcgtggttcaacggtatggaaggcggtaatgcgttagtggatgttctctcgggtaaggtcaacccgagtggcaaaatgccattcaccacgccggtgagcttagatcagtcgccggcgcacgcgcttggcaacttccctggtcgcgacttaaaagtgaactacgaagaggatattttggtgggctaccgctggtttgatacgaaaggtctgcctgttgtatacccgttcggctacggtttgagctacacgaccttcgactacagcaaccttaacaccgacaaagaaacctatgaccaggcggatactatacaggccacgtttactctgactaacaccggggaccgtgagggcgctgaggttgcacagctgtatgtttccgatccggtgtgtagcgtcatgcgcccggtgaaggaactgaaaggcttcaagaaggtgtttctgaaaccgggggaatcacgtcgcattacgttagacatcccagtgagtagcctggcgttttattcggaggcccagtcacagtttgtggtggaacctggcgaattcattctgcagttgggtgcttcggcgagcgatattacccagcgaatttcagttgaggtcaagtga

SEQ ID NO: 450 - DNA, 2301 bp, Artificial Sequence
  6xHis UPI0005006C6A
atgcatcaccaccatcaccatgagaatttatactttcagggttcgatgaatgccgcgcgcaatggctccatgcacgaactgagcctggaacagcaggcgtcattatccagtggcgcgtcgacctggactagtcagccggcgggtgacattgaaagcatgcatatgagcgatggcccgcacgggctccgctatcaggggtccgagggagattctctgggattaggttccagtaccccggctacctgctttccgacggcgtcaggcatggccagtacctgggatcgtaatatgatttttgccgtgggtaaagctctgggtgaggaagcacgcatgctgaatgtgagcatgctgttaggtccgggccttaacattcgacgtagcgcgctgggcggccgcaactttgaatacgcaagcgaagatccgtttttgtcaggaagttatgggtctgcctttgtgaaaggtgttcagtcccaaggcgtgtctgcggtaccgaaacatttcgcggttaataaccaggaaaccgaccgtttccgcatttcagcgcaagtcgatgaacgtagcctgcgcgagatttatctgacggccttcgaaatgacagtgaaacaagcgcgtccgtgggcgctgatgtgctcgtataacaaggtaaacggtgtgtacgcctccgaaaatcgcgaactgcttaccgacatcttgagggaagaatggggtttcgatggagtagtagtcagcgattggggcgcagtcgtgaacagggtggccgcgctcaatgcgggcttggatatcgaaatgccgccaagcaatacggacgaccagatagtgcacgctgttgagtctggtgattgcagccgcgaaacgctggataccctggtcagtcgtgtggcgactctggcagaacgcagtaaacctagccgctcgggggacatgcaatcgttagaaagttgtgcccaagaacacgatgccatcgccagggaagccgctcaggaaagcgttgttatgttaaaaaatgatggtattcttccgcttgatccatcgggcgagggcgtgattggtgttatcggcgaactggcgcgcaccccgcgctatcaaggcggcggaagctcgcatgttactccgattctcctgcacaaccttctggatgaattaggcaaagcaatgcctcagcgtcgtctagatttcgcccctgcatacagcctgcaagcgggcgatcattccactcgcgatgatctcatcgccgaagcagtatccgtggcggaacgcagctcagcagtgattgtgaacgttggttatgcgcaatcggatgagagcgaaggtagcgataagcatgatattgagttgggcgacgatcagcaagccgtattacgtgccgttcaaggcactggtaccccaatcatcttggtgatctatggggggggtgtcatccgcctaggccagtgggcacaatctagcagcgcaattgtggaggcttggctgccgggtcaggcaggcggtgcggccttagcggacattttaaccggcaaagtcagcccgtcaggtaaactgacagagagcatcccgctgcgacttgaagacaccccgtcatacttgcactttcctggaagcaatggtgttgtctgttatggcgaaggactgtacgtgggctaccgttattatgacactgcgaatgtggacgtcgcatacccatttggcttcggtttgtcttacaccacatttgagtattccaacctgaaggtggaaccgcgtggggcgtgcgaagcggatgtgcactttacagtgtcgaataccggccgtcgcaaaggtgcggccgttccgcagatatatgttcgaaacggaatgcccgatcgtccgaagcatgaactgaaaggctttgatcgtatcgatctggaggctggcgagtctcacgacgtaactatccatctggatcagcgcgccttttcagtgtgggacacccgtgatcatcgttggcgtgcgtacgagggcaactataccgtagaattagccacaagcagccgcaccattgttgacgaatccacgattacaattgccggtgacggttctgtacctccgctggaagatatgagtactattgaggaatggatggcgtcgccttatggtgccgcggtgctgtcaccattagtaaatcgcattcatgattcggtgccagatccgagcccggaaatgactgccatgtttaatcagatgccgctgatcaaactcgcctcctggaatattggtctggatacggcagcggtggaacgtatggtggcaaaagccaatgcgttacgttctgcacagcaaggctga

SEQ ID NO: 451 - DNA, 2622 bp, Artificial Sequence
  6xHis UPI00059A3BA8
atgcatcaccatcaccaccacgagaatctatactttcagggctcgatggccccgtcagactttgcaaaagccgacgtggaggacgttcttgataatctcaccaccgaagaagcaattctcctcaccgcaggtgtgggtttttggcatacccatgcagtcgaacgtcttggcgttccagcgatcaaggtgtcagatggcccgaacggactccgtggtaaccattttttcatgggaacccccgcgaaatgcctgccgtcaagtacagcgttaggcgcgacatgggatacaaaactggtgcgggaagtgggtcttaagttgctggcgcaggaagctaagtcacgcgcggcaagcctgattttagccccgacatgcaatattcagcgcaaccctttgggcggtcgctcctttgaaagcttcagtgaagatccattcctgagcggtattatcgcagcggcatatgttaacggggttcagtcgggcggcattggaaccaccattaaacactttgtggcgaacgataaagaagatgaccggttagcgtacgactctatcctttcgccgcgcgccctgcgcgaaatataccttatgccgtttatgctagcccaaaagtacgcccagccgtgggccgtgatgtcagcctacaaccgagttaacggtctgcatgtgtccgaaaacccgttcctgctgtcaaaaattttgcgcgacgaatggaaattttcggggcttattatgtccgactggtttggcacttactcggtggatctggcactgaatgcgggtttagatctggagatgcccggaacaaataagtggcgaagtttagatttagtaagccgttcaatccagtcccgcaaagtaaccctgcgcaccatcaaaaaacgagccaaaaatgtcctagaacttgtgcagaaatgcgcgcaaggcgccccggaagtactggacggcgatggcattgaacgcacggtagatacccaggaatcatcggagctcctacgcaaagttgcggccgaaagcattgtccttctgaggaatgaaggggcggtgctgccgttaaatccgcaggggctgaaaaaaattgctattatgggccctaatgccaaggcgattgtgttatcaggtggtggctctgcggctctcaaggccagcttttacgttaacccgtacgaaggcatcgtccgtgcaattaaagaatcaggcagtgagattgaaattggctattccgaaggtgcccgtgcgtataaaacaatgccgtctttagactatgagatgttcactacgacgggcgaacgtggctggatcggatcttggcataagcacactaatgatgatagctttaccccggtggatgaggtgttggaagaacgcctgatagacgaaacgcgtatttttatttcaaccagcatcccggaaggtatcaccaaacgctggactatgaaactgcgcggtcaactaaagccgcgtgaacgtgattgcacctttgaattcggtttgactgtggcgggtagagctaagctgtatgtggatggcaatctgattattgataactggacgcgccaacgccgcggtaacgacttttttggatgcgcgagcgtggaagaaaaaggaacctatgacctgaaggcgaatatgaagcatgacatcttagtggagttctgcaacgtccgcggtccggcggatggcgacgaagatgaagtagtcatggactcaaatccgggtgttaggctgggtggtgcggttgtagaagatagcgacgaactacttgaaagcgcgatcaggttggctaaagattcggatgcagtcattgccattgtcggtttaaactcagactgggagactgaaggatacgaccgtaccaccttggaattacctggccgtacaaacgaactgattcagaaactggccgcagtaaatcagcagctggttgtggttaatcagagtggttctgcggtcaccatgccgtggtcggaaaatgtaccggcgattattcacgcgtggtacttgggcaatgcaagtggggatgcgattgccgatgtgatcttcggaaagcacaacccctcgggaaaactgtcgttgaccttccctaagcgcttggaggatgttcctgcttttggccattttcattcggaggatgggaaagttcgttacgcggaagacctgtacgtaggctataaacattaccagcataagaacatcgaaccgttatatgcctttggccacggtctgagctataccgcatttaacctggcggacctgaccctgagccagccgaccgtgaaaaatcgggagtttcacttgtcaaccagtgtgaaagtgaccaatactgggagtgtttcgggctcagaagtcgtccagctgtatatctccttacctaccacaagcaacctgactcatcctaatctccagctgaaaggcttcgcgaaggcctacgatttggcaccgggcacatcccagatccttgatattgccttagacaaatatgcggtgtcatattggtccgagttgaacgatgcttggaccgtcgaaaagggcgcctacgtggttaaagtgggtacagctagtgaccgcttgagccttgaagccaccttcgaagtgaaaaacggcttcgaatgggcgggcctgtga

SEQ ID NO: 452 - DNA, 2247 bp, Artificial Sequence
  6xHis UPI0006579FEA
atgcatcaccatcaccaccatgaaaatctttacttccagggtagtatgacacatccgacaccgttctcggccattaataacgatcctccgtcgccgcttccggcgtataagaacccggcattaccggcggaacagagggtccaagatttactggcgcgtatgactccggaggagaaagcaacgttattgtcaggcagcggttggatggaaagcgcagcaatccaacgtcttggtattcccgcgattaaaatggttgatgggcctgtcggcgttcgcgcatggacgggcagctctgcggaaacgaaccgtcctgatgcagacgcagtgaagatactgagcactgcatttccagtaggcattgcattagcggccacgtggaatacggcgcttgcggaacgtcaaggccaagcgattgcgcgtcaggtgaagaccctgggtcgcaatatgctgttggcaccgacggtgaatattagccgtttgccgctgtgggggcggaacttcgaaggctacggcgaagacccctatcttgcaggccgtatgggggtgggctatatacgtggagtgcaaggtgaaggcgtgattgcatcggtgaaacacctagcggtgaataaccaggaatttcagaggcgtcgcgtgaacgttaccgtggatgaacgcgccctgcatgaaatttatctgccggcgttcaaagcggcggtgcaggaagcgggtgtgtggtctgtgatgtcagcctataataaagtaaacggcgcgcatgcgagtgaaaacaaaccgttactgcacgatatccttcgtcgtcaatgggggttccggggtttcgtgatttccgactggggcagcacctattcgaccctcgcaccgttgaatgcgggtttggatctagagatgcctgggggcgccgcccgtcagcgctttctggactcaccgcgtgcggaagctgagtatgcgcgcggtggttggctgaccgctgagagagttctagccgaaattaaagcgggccgtctgagtcaggatcaggtagatgaccatgccggaaatattctgcgtgcaatctttttaagcggtctgtttgatcatcagcccgcgggtggcggcgaattggatactccagatcaacaagcgctggcccgccagatcgcaacggaatcgatggttcttcttaaaaacgagcgcggtattcttccgctggaccccgatcgcatcaaaactattgcggttatcggaccaaacgctggtgttgcgaggaccggaggcggcgggagttccctggtaaagcctaaaaccgccattgcaccgttcgacgccattcgtcaacgtgcaggcgcaggtgttaatgtgcggtatgcacttggcgtctccatggccggtgaggacccacgcgaggataataccctagcacgcgcacggcaactgaagaatgcgaccgacctggcagcaaacgcggatgtggcaattgtggtggtaggacgttatccaaaactggaaggcgagggctttgatataaacgcaatggacttaccaccgggccaggacacgctgatccaggcggttgccggagtaaacccaaacaccattgtagttcttaatactggcagcccggttaccgtttcccgctggctgccggatattagtggccttgtgaacatgtggtatggagggcaggcaggtggtgaagccctggcaagcatcctgtttggcgatgcaaacccgagcggtaaactcccgttgaccttccctgtcagctgggaagattccctggcatacggcaattatccgggcgaaaacttgcaggtgaactacgcggaaggtatttacattggctatcgctactttgacaaaaataatctccagccccagttcccgtttggattcgggttgagttatacaaccttcgaatatagcgaacttgcggtagcgacggttaataagggcaaacagattgcaaatgtgaccttacaggtgcgtaatacgggctcacgtgccggtgcagaagtggtacaactgtacgtgcatgatagtcattcacgcattgagcgtccgctgcgagaactgaaaggattttcgcgcgtcgaattacagcctggcgaagcgaaaacggttagtttttggttagagctaagtgcgctcgcgtactattcaacggaacaggcggattgggtggccgaaccgggacagttttcattacagattggtagtagcagtcgtgatattcgactggaggctgcgctggaactgaagtccagttga

SEQ ID NO: 453 - DNA, 2340 bp, Artificial Sequence
  6xHis UPI00073C9E60
atgcatcatcaccatcaccatgaaaacttgtactttcagggttcgatgggacgccaagcgaaggccaaaggtgtgcatttggtattggccccgaccgttaatatacaccgctctccgctgggtggacgcaactttgaagcgtttagtgaggacccattactgtcgggttatttagcgtcaaacctgattagcggtatgcaggagcagggcgtaggcgcaacagttaaacacttcgtgtgcaacgatgtcgaaaccgatcgtaccaaagtagatgttattgtgcaggaacgcgctctgcgcgaaatttatctgaaaccttttgagattgttattcgcgaagcaaagccgtgggcggtaatggcgagttataataaagtaaacggcctgcacgtaagcgaatcaaaacatctgctggacgatatcctgcggaaggaatggggttttgatggcgtaattatctcagattggtggggttcgtacagcacgtccgaatcattaaatgcgacgcttgatatcgaaatgccgggtgaacctatctggcgcggagcctcgcgtattacgcgtgcagtcggttgtggaaaggtatccgaagaaacggtccgtgcgtccgcgaaacgcgtgttagacttagtaaaccgtgccatcgaatcaggcacaccggaaaacgccccccaagaagaagcagatagtccagcgtatcgagagctcaatcggcgcgctgcggcatcgtcagtggtgttactgaaaaacgaaaagtcgattctccccttacagctgagtaatcgtccccgtatcgctgtgattggtccaaatgccattaaaaatgtcagctcggggggtggatcggcatcagttaacgcctaccattatgtcagcgcactggatggaatcaaagcgggggtcgcctccaatgcgtccgttagctttgctcacggttgttactcggatgagatgctgcccctgatgaaaacagtgacagtgtcaggtgcagaaggcctggatattgacctctttccccacccattcgactttgatgcacagccgctcccttcccccgcggcgactgttacgtccgaaacctctcgcatgttttttttcgattgcctgcctcccgtggcacttcctattacctgggcgctgtgtgaaggcatttttgagccgaaagtgactggcgaatacgattttggcgttgcaaccacgggtcgggcgaaactgtttgtcgagggacaactcgtagtggataattggagcgaacaaaaagccagccgcgcgtttttcggaatgggcacccccgaagtaaaaggccgaatggctatgacgggcgggcagcgttacaaggtaagtattcagtatagctgcatctcggcgctacccgatcgtaagccgggccaccttggtggcggtatattacgtatcggtgcgcgcctggccgtcgataaagcggatctcctggccgaagcagttcaactggccagcgccgcagatgtggtcattctctgcctggggaccgactccgaacgtgagtctgaaggctttgacagaacgacaatgtcccttcctgaggaacaagacgaactagcgaacgcggtcttagaggcgtcagaccaagtggtcgttgtcaacttttcgggcagccctgtggcgatgccatgggcgcctaaagcgaccaccattgttcaggcgtggtttttgggcagcgaacttggaaatggtcttgttgatattctgttaggcaacgttaacccctcagggaaactaccggtgagcttcccggttacattagaacagaacccgagctacgcgaatttcccgggccagaacgccgtaattcggtacgaagaaggcttatttgttggttatcgccactatacaacccagggaatgctcgcgctgttcccgtttggtcacggactctcgtacacgacatttgagtatcgtgacctggtggtgtcttcccagcgctttactccacagaaaaccagcattgttttcactattgtgaattctggagcactcccaggtgatgccgttgtgcagttatatattagcccaatttctagcacagttgtacgtcctgtgagtgagctgaagggttttctcaaactgcataacctactgccgggcgaagcccgtagctctgaattatcactgcaaccggaacacctggcatactgggatgattcgcaccatagctgggtgatcgaatcgggtcgctatcgtttgtcattaggtcactccagcgtttctatggcaattgaaaccgagattctggtcgaagaaagggtggaactgcgtggtaactcactggatatgttgtcagacatccgcccgcgatattga

SEQ ID NO: 454 - DNA, 2232 bp, Artificial Sequence
  6xHis UPI0006C6E0C3
atgcaccatcaccatcaccatgaaaatctgtacttccagggttcgatggataaattcatattcattaccctttttcttgtagggaacgtcttcagcgtttgcttagcgcaaagctatccgtatcaaaaggagtcaatcccagtgcctcaacgagtaaaggacctgctgtcgcgtatgacgttggaggaaaaaatcgcggagctgaacctaattccatactacacaaaagacgattctatctgccgctcacttattcgtgcgggtaaagttggagcctttttgaaggctaacggcgctgaattaaaccgttcgctccaggaagaggccctaaaacatagtcgcttaggcattccgcttgtttttcacgaagatgtaattcacgggtaccgaaccattactccgatcccgctagccgagtcgtgcagttggaatccagagcttgtcgaacagtcagcagcgatggcggctcgtgaagctgcagcggccggtattcagcttacgtacgcgcctatggtcgatattagttatgacccgcgctggggtcgtattatggaaaccagcggcgaagatgcatacctgtgtggtgaactggcggcggcccgtgtccgtggatttcagggaaatgatctgacgtcaccgcacaccattgccgcatgcgttaaacacttcgcaggctatggcgcggtgatggctggccgggattaccaggaaacggatgtatcgttgcggaaactgcaagagatttacctgcccccgtttcaggcagcgattaatgcgggtgcagcgtcagttatgtgcgcgtatacttcgtacgatggtgaaccgcttactatgaactatttcatgaacgaagaagtcctgcgcaaacagatgcagttcaagggtttattgatgactgactggacgacttttcagcacgcagtcacggagggcgcggcggataacggccaggaagcagcagaacgtggcattaagtcaggcattgatatggacatgagcgcgaaacaattcattgaatttctgccggagctggtacgaacacagaaagtgccggaacagttaatcaatcgcgcggctgcgcgtgctttagagttaaagtttcgccttggtctgtttgacaacccgtttgcatacttcaatacggaacgtgaaaagcagaccctgtattccaaggaatcacaggaagatgcctatcagatggcgtgccagtcgatggttctcctcaaaaatgaagatcgtaccctgccgttgtctgattcaaaacgtattgcgctggtcggccctttcgcaaacacacgttaccacctgttgggatcatggaacatgaaaggggacagcaaagaagtcatcaccgtcgaagaaggttttaaagcgttacgtaccgatattcctattgacgtgcgtgcgtgcgacttctcgggtattacaccggcctacctgtccgatgtatgtgccttagcccaaaaaaacgaaattattatcgcctgcctgggggagccaagtaatctgtcaggcgaagcggtgtcaacagccaaaatcgagttacccgaccagcaaatgcgcctcctgaaggccttaaagaccaccggcaaaaaaattattgtagtgttattcaacggccgtcctctggtcctggatgaagtgattaaaaactgcgacgctctgctagaagcgtggtatccggggactatgggcggcaaagcggtcgccgcccttctgaccggaattgaaaatccttcaggcaaactgagtcagactttcccgcggcatgcaggccagattccgattgtctacaacgcccgccgcacgttttataccgttcatcatgctgacattccgcagggtgcactcttcccgtttgggtttggccttagttacacgcagtacaaatactccagccttgtgaccgataaaaccaaatatcgccgcggagattctgtaaccgtgcggatcaaaataaaaaacaccggctctgtggccggccgtgaaattgttcaactgtacatccgcgatgaagtagcgacagttatcccgagggaaaaagaactgaagcgtttcgcaagtattcaccttcagccgggagaggagaaggaaatccgattcacgattccgagcgcggatttttcgatttataacaacaagatggagaaagtcctggaaccgggcagttttaccattggcattggtccgaatagctccgaactgaaccagacaaaggtttactttctgtga

SEQ ID NO: 455 - DNA, 2478 bp, Artificial Sequence
  6xHis UPI0008153D6D
atgcaccatcatcatcaccatgaaaatctgtattttcagggaagcatgacctttgaagcgcgttacctggatgccggtttaaatactgacacccgtgccgatgatctactagcgcgcatgactcttgatgaaaaaatcgcacagattggcggtgtatggggccggtctattgcggaggccggttcggtgttagaagaggtagcggtgcgcgtgctgcacaatggcgtgggtcacatcacgcgtaattctatgttacttgcccctgcggaattggcgcgtaataacaacgcaattcaacgctggcttgaacaccgtacccgactgaaaattccggcgattatgcacgaagaggggtgcggtggtcttatgatccgtggcgcaaccacctttccaatgccgattggtctggcgtctaccttcgaacctgatttagccaaacgcattgggggggtcattgcgcgccagatgcaggcggttggtgcccatcaagtcttagcccccgtactagatgtcgtacgcgaccatcgttggggccgtgttgaagaaacctttggggaagacccgatgctcgcgggccgcatgggcgtagcatacattcgcggagcacaggagactgaacgtggtccccgtattgcatgcacagcgaaacattttatcgcttatagcggaggtcaaggtggtctgaattgggcgccagcagattttgggcatcgtgccctgcgtgatacctttttaccgcctttcaccgcggcaattcgcgaagcaggtgttggaagcgtgatgaacgcgtaccaggagatcgatggcgtaccttgcggtgcatcccgtgaattattaaccggcttattacgggatgaactaggatttgaaggtaccgtggtgtccgattacgatactctgagcagcttgcactgctatcataactcagccgtggacgcacaggaagcggcaaaacaggcgattaaagccggcattgatattgaactaccggaactggatctgtacaacgatgcgctgcgcaaagctctggcggaaggggaaatcgaaatcgcggacattgatggagccgtgcgacgtatcttacgtcagaagttttccctggggctatttgaaaatcgctacgtggatgaaggaacagttggcctggcgttcggatgcgcggaatttgtggaattgtcacgagaagtggccggcaaatcgctgattctgttaaagaacgatggccccttgctcccgctggatcgtaagattggtaagatcgccctgattggtcctgcagccaactccgctcgtttggtacaaggcgcctatcattatcctagcttttatgagtttcaatttggtggtatgccggattttgaaggcgacactagtcgcacgacgcctcctcgtgatatggtgtttgcactgccggcggcggcttcagatctggcgtatgataaagcaagcaatatcgagcgtccgtcgtgggacgaacacttgccgccgactgtaagtattttcgaaggcttgagatcggttgcaccagccgaagtagagatctcatacctgccggggtgttcaatccgcggggatgagcgttcgggccttcaacaagctgtggaccttgcccgtgaagcggatgttgcgattttatgcttaggcggtcgcagtggtttagcgcgtgattgcacagatggcgaatttaatgatcgcgtagaccttaagctgatgggtctgcaagaggagatgctgcgttcggttgtggccaccggtacccctgttgtgttagtgctgctgaacggccgtccgctggatttatcatgggccgccgaaaatgttggcagcattgtcgaagcgtggctgccgggcgaacagggtggtcaggccattgctgaattactctatggtctggttaatccgtccgggcgtcttccagtgtctctcgcccgcagtgtgggccaaatgccgttgtattacaatcgtaagcctagcgccggtcgctcacaggtttttggtgattatactgatcagcaggcgtcaccgctcttcccgtttggtcacggcctttcttactcagagtttgaattttctaacatcgaagtgaaaagcgagtcgtatgcggtgggagacgatattcagttgtgggtggatgttcgcaatgtcagcagccgtgatggtgacgcgatcgtgcaattatacgtgacggaccccgttggttcggtaacccgccctgtattagaactgaaggcgtttagccgcgtcccggtgcccgcacgtgaatgcagacgtgttgcatttactttaccggcggagtcgttcgcgtttcatgggattgacggcgccttagcggttgaaccgggcgcactaaaactaaagatcggggagagtagcgaagacattcatgaagaagtggaagtccagttatccggtgaacgccgcatccttgccgagtactccgccccagcgtttacggttgaaattgaacctgtggattga

SEQ ID NO: 456 - DNA, 2379 bp, Artificial Sequence
  6xHis UPI0008206E7B
atgcatcaccatcaccaccacgaaaacctgtacttccagggctcaatgaaaaaagagattgaggctattatcgagcgcatgaccttggaacaaaaagcaaccctgtgcaccggcgcaacccattggcgcactgcggcgttcccggaattgggtattccatcgcttattgtcgcagatgggaccagtggcctgcgccttcaagcgggttcccaggacaaagaggaaaacgatctgtatgaaaacgtgatgtttttttctttcgactcaccggaagccatcgcacgcactcttccgtcaacttgttttcctgcgggctcagccattgcatgttcttgggataccgcactgatagaagaagtcggcagcgcgatcgctaaagagtgtaaagcccacgacgtaggtctgctgctcggcccgggcttaaatctgcgtcgccatccgttagcgggtcgtggtttcgaatactatgccgaggacccagttctgagcggtgaaatggcagcagggatggtccgcggcatccaatcacagggcgttgcggcttgcgtgaaacactttgcatgtaacaatgcggactataagcgtacctggattgatagtatcgttgatccgcgtgccctgcatgaaatatatcttgcaggttttgagcgtgctatcaagaaaggactgccacgcgcagtgatgggtgcctataacaaagtcaacggcgtccagagttgccaaaatccgtatctgttaaccgacgtgctgcgagatgaatggggtttcgatggtgtcaccatgtcggattgggtagcagtgaaagatccggcggaagcctgtcgtgccggcttagatctccaaatgcctccttctgcttcgtgtgtgcgagcaattgtggccggcgtgcaagacggctcgattcccgaaagccgcgttgatgattgttgtcgacacctgatcgaacttgcgcttacttattctcaagaaggcaaagaacatcagcctgttgattttgcggcacatcaccaacttgccagacgcgccgccgctgaatgtgctgtgttactgaaaaacactggcgtgcttccgcttgccaaggacacccgttctcttgcggtgcttggtgcgcttgctcagtatccgcagtttaacggtaccggctgtgccgcgatgaatccacaatgtagcgacatcccactgcaggaaattaaagccctggctccggaaggctgtgcagtgacctatgcgcctggctatacccgcgactatcggcatgatgatgcgcttctagccgaagcggtagcggctgcccgtgacgcccaggcggcggttgtttttgccggcgcgttcttgccgccggaggatgacgattttaatcgccgtacccttgacttagaaccggctaccgcggaactcatcgaagaagttctggcggttcagccgaacaccgtggtagtggtttataacgctgagtcggtggctatgccgtgggcggaccgggcggccggaattttagacctttggtttagtggtgagggttcgggtcatgcagcggcccagctgctgtggggtgaaatctccccgagcggtaaactcccggttaccatgcctgttcggatcgaagatacaccggcctatctaaatttcccgggcgaaggggattatcattattactgtgagggcatttatgccggctatcgttattatgagaaaaagaaaatcgaaccgctgtatccttttggccacggtctgtcgtactcccgttttacgtattcggcgccgcgcgtgtcggttcctcagctagtgttaccaggtcaagtaaccgtttactgtaccgtgcagaatgatggccagatgccggcagcggaagtggttcagctgtatgtcgcggatcgccatgctaaattagctcgtccggaaaaagaactcaaagcgtttacacgtgtgtatctgcagccgggcgaaagccgtgaagtgcagcttacgttggaaactcgtgacttttgctactatgatcctgcctgtggttgggtggccgacagcggtgtatttgaattgctgattggcgcttcgtcagccgatatcaggctgcgtatcgacttgccggtgatctccgaccgcccggcgcctttcgtcatgaccacagatacccattacgtcgacctgttcgatgacccagttgcgacccaggtcttctacgattatcttgtggagaaagggttattacagcgtgagcagatctcagcagagctgaccgaacactttaaggttattttttggggtatggcgcaacatttagacggggcgacgggtgatcgctttaccccagagatggcgtctgaagttaccgatcgcattaaccgtgcacttgaaacgcgtcaacaaaccgcccgttga

SEQ ID NO: 457 - DNA, 1404 bp, Artificial Sequence
  6xHis UPI0008AC0E17
atgcatcatcaccaccatcacgaaaacctgtattttcaaggctccatgaaaaaaaacgccaaaaccctgaaattcccgaaaggttttctctggggagccgcgtgcagcagttaccagtctgagggcgcgtggaaggccgatggtaaaagtgaatcgagctgggatgtctttgcgaaaaaaccaggcattgttaaaggcggtagtgacgcaacggtggccattgatcactatcaccgctacaaatcagacatcaagatcatggccgaactgggcctgaaagtgtttcgctttagtacgtcctggccccggattattccaaatggcactggcaaagtcaaccagaaggggctggacttctacgatcgctatgtggatgaacttctgaaatacggcattaaaccgttcatcacactgtaccattgggacatgccgaacgtgcaggaactgaaaggtggattcagggaaaaagcgacgagctatgccttcgccgagtatacgactgccgttgtgaaacgtctgggtgaccgcgttaaagattggactacattcaacgagatcaaacatatctgggagggctgctacaatagcgactggcaggctccgggtctgcatcttagcgagaaaattaataaccaagcgctgcacaacgtacatctggcgcatggcctggcgaccaatgttattcgtgcgtactcaacgtcgtgcaccgaagttggtgtggtacatgcgatgtggatccgcatgccgcgtgatccgaaaaataagaaggatgtgtgggcggcggaaaaatgctttatcaacaaaaacagccgtctcctggacccgctgtataaaggagaatatccggcgcacatgtggtcgaagggcagtgtgcccgaaattaccaaagaggaaatgaaaatcatctccaccccgctagatttctttggcctcaacgtgtatgggggctgcgacgttaaatataacccgaaagaaaaaagtgggtgggaagaaattttatacgatccgacggtgccggtcacaacaatgaattggggtgttaccccgaatgccatgtactgggcggtgaagcacattcaggacaactacgacattaaaaagatgtatattaccgagaatggggccgcatatttggacgtgattacccacgacgggaaaattcacgataccgatcgcattaactttctgaaccagtacctgtcagaactgcatcgcgcaatgaaagccggctataaagttgacggctatttcctgtggtcactattcgataacttcgagtgggcaagcggttacacacagcgcctgggttgtgtgtatgttgactatccgacgcagaaacgtatcctgaaagatagcgcgtattggtataagtcagtcattaagggcaacggcatcaaaatttga

SEQ ID NO: 458 - DNA, 2451 bp, Artificial Sequence
  6xHis UPI0009C6C8E4
atgcatcatcaccaccaccatgaaaacctgtactttcagggctctatgaaaaaggcccaagggaagaaatcaatcgtggatactctgagcgacgaacagaaagcacccctgctgtacggcaaccaggactggcattcacatggcctgccaaaaaaaggactggatccaattgaaatgcacgatggcccgctgggcctccgctatgtgaaagaagagaacgtatcggacctgtcggccaaagtggcgagcacatgttttccggccccgtgtctgctggcctgtagcttcgatgtggacttggaaaaccgcattggtcagatgatggccctagaaactcgtgcacagaaaaccgacgtattgctggctccgggtatcaacattaagcgtaatccgttatgtggtcgtaacttcgagtactttagcgaagatccattacttgcgggtgagatgggtgcgtcttttatcaacggccttcagaaaaacggcattggcgcatcactgaaacactatgccgttaactcccaagaaacaaaccgtatgattgttgatgccattgttgacgagcgtgcgctgcaggagatctatttaaaaggcttcggtattgcggttaagaaagcgcagccgtggactgtgatgtgcgcatataaccttgtgaacggtgtgtattgctctgattctgattacctcctgaataccgtgttgcgtaaacaattcggctttaaaggtgccgtaataagcgattggggggcaacgaatgatccgattttaagccacaaccacggcctggatctagagatgccgtgctggagagaccatcaccaggaaattctggatgccctcaaagatggtcggctggatcatcaagcatttgacgacagtacgaagcgcatggtcacgctcctggaaaaggcaaacgctcctaagaagccgaagggctttacctacggcatgagtcacaacctggcccgggaagccattactaagagtgcggtacttttaaaaaacgaaggctcgattctcccgctagaaaattatcggtccgtgtgtgtgattggcgcctttgcgaaatcgccgcgttttcaaggcaacggaagctctcaagtgacgcctgtacaattaaccaactttgtagatcatatcaattcacgtcgcaaaccaggcgatgaagttccgttcgccccgggttatcagaccaacggtacctcaagcgactctgatttatcatttgcagcggtcgacttagcgtctcgtagtaaaacggtcctgtatttcatgggcctgccgctggaaaatgaaagcgaaggctacgaccgtgaaaatatggaactacctgccaaccagattgaactgttaaagaagatacatgaagtgaaccaaaatatagtggtggttctgtcttgtggcagtccggtcgagctgccattccttaatgatattaaagggctgctgttagtttacttgaccggtgaagcgttcggcgagggtattgacgacctgctgctgggtaaagtttcgcctagcggcaaacttgctgaaacatggcccttgcactactacgacgttcctaatcgcgaattctaccctggcaccggccgccaggcgctgtataaagagtcaattttcgttgggtaccgtttctatgcgtcagccgataagcccgtggcatttcctttcggttatggactaagctacgcgtcattcaaattcaataagctagtgctgtcgcgtaaagcggtgaaagatgccccgtttacagcgagcctgctggttgaaaatttgagcgataagaatagtgaattagtgctggaactgtatgtgcatcagtcgcgcagcaaaaccgttaagccgtttcgagaactgaaagcattccagaaagtcttcattaaggcgcacggcaaagccaaagttctgttccagctagatcccagcatttttcagcatttcgatattgcctctcatcaatttgtgaccgagaaaggcaactaccgcatcgaaattggtacgtcatgcttggatattgtttcctctgcagcgatcaaagtgagttcagactgggaagcggttgaccagcgcaaggtgctgccagattacttctttgtatcaggcaaaggatttgatgtgccgaatgaagaatttgcgcgccttctgggacatgatattccgaccccgaaggatccgaaagtacgtccgtataaccttaacagcacgctgaacgatatcgatcaaacatggattgggaaattggccaagaagaagattgtcaaagaaatggataagtatgcgagcaccccagccgcgaagaaaatgttcattgatggcgctaccactagcccgttccgcgcaggccagatgggccacattgaaccccgcatgatcaacagcttacttctgttcgccaacggtcacttttggaagggtattcacgcctatctcagtggcccgaagaaatga

SEQ ID NO: 459 - DNA, 1701 bp, Artificial Sequence
  6xHis UPI0009CEE1AB
atgcaccatcaccatcatcatgaaaacctgtactttcagggctctatgtacaacacgttagatcgcgaacagaaggcatgggttgatcgcgtgtttgcacagatggatgaacgccaaaaactgggccaattggtgtgcgagcgtggctattatctgcgggaagaagtcaaacagccagcggaatggcttaaaaagtaccctgttggctttctgtttgtggggagcgaagtcatacagttacagagcgaaaatgtcggcgatgtgaaccgcgtgacccagtacgcgaatggcacggactatgcgccagtcgtttactgcggcgactttgagcgcggcattggtgataatatcgcaggatataccttactgcctcgcctaatggcactgagcgcaggcttctcagagaaggatgcctatgattatggccgcattatcggcgaagaagcgaatcaactgaacatccgttgggcgttcggccccgtgagcgatctgaacgtcaatcgtgataacccggtgaccaacgtgcggtgcgcgggagacaatcccgatcatgcgattaaaatcctgtcgaatatcgtgcgtggcatgcaggaacatggctgtgccgcagcccctaaacatttcccgggcgatggaagcgacacccgtaaccagcactatgttacgtccttaaacctcctgccgaaggaagaatgggatcgctatcatggccgcgtatttaaaacactgattgatcagggcgcgatgagcatcatgattggccatattggattcccggcgagtgaagaaatggatccggtccgcggaaaatttcgtccggcgacctgcagcaaacgattaatgaccgatctgctgagggacgagctgggcttcaaaggcattattcttactgatgccctgtgcatgtgtggctacgcaagctgggcagattacgaacagcgtacactggattcatttaacggaggcgttgatatcttcctgtggccggaaaccgagcgtttctttgacctcatggtgcgtgcgtttgcagatggcagggcaagccgagaacgacttgatgatagtgtcaagcgtgtgttggcctttaaagcgcgtctcggcgtgcaccgtgaacgcaaggtcctggaagcgaaagcgcttgaagcaaaacttcgggagaacagagaattagcccttaacatggcgtataagggcgctacactactgcgtaaccgcaaaaatctgattccgttgaaactgaaaaaagatgccaaagtgcttgttctggtgacgcctgaaaccccgggccctatgaaaggcgccattgaatttcacaacgagcttaaacgcaggggttatgatgttacctacgcccctttctctcagttcagcgcggttaaaagcgttgtggaaagcttcgacgctgtgtttttaatctgcaacgcgcagccgatttatagcgactatcgaggtttcaattttgcgctgtgggactttatggcaaaccgcgacatggatcgctggatcattgttagcaccggcagcccgtactatctgtacgatgtcgcctctgcggaaacgtatgtcaacgtttattccgatagcacggtgtcaattgtagcagcggttgaggccatttttggtgaaaaaccgttcctgggccggtccccggtaggagtggaacactgttttagctttggagacggaattattaccggttga

SEQ ID NO: 460 - DNA, 1416 bp, Artificial Sequence
  6xHis UPI0009CAAB0A
atgcatcaccaccaccaccacgagaatctctactttcaaggttcaatgtttgaagatccgcttaaagaaccaccgcgcacaggcttcccggcagattttttgtggggtacagcgaccgcagcgatggccgttgaaggtgcactcggcgacgctgtacgcggcgaaaccatttgggatgccttctccgcggcagaagacgaaggattcaccggtccggatcgcggttgcgatcatctgcgtcgactcagtgaagatatcgaattaatgcgtcgtctaggagcaggtgcttatcgctttagtgttgcatgggcccgtgtgttcccggaaggtcgtggccgagcggatgctcgcggtgtagcgtggtatgaaacactgattgaagccttagcacgtgcaggcattcgtccgttcccaaccctctactattgggatcttccgttggcgctgacacgtcgcggcggctgggcacaccgtgatactgctctttatttcgccgactttgccgcattttgcgcagaacgtttcggacattgcgtgtcatggttcaccacgttgaacgatccgtggtcagccgcactgcgaggctatggagatggtagtcatgcccccggtattcgcggacacggacgtcgcgcgctgcatcatctattattagcacatggtcatgctgcggcagcggttcgtcaacttgctggtgaaaaagcacgcgtaggcattgccgttaccgtgaccccggttcatgcggcccgtcctgaagcagcgcacgcgcaagcggccgccttatatgatgcgtacctgaaccgttgcgtcctggatccgttactgctggggagttatccgctggaaacggatgcaatctttccgagggaagcgtctccggcggtagatggcgatgctgaactgattgcggccccgttagattttatcggcctgaattattatacccgtcgtctggttctggctgcccctggagcacgtccgctgcctgtaaaaattcttccgcccccgcccgcagcccgtaccccgttggacgatgaagtctatccggcaggactgcgcgaggcgctggatcgtttagcagacggctacggtcaaaagaagatttttgttaccgagaacggcatcccttgcgaagatagcaaagcggatgacggcacagtgcgtgatggtgcgcgtgttgaatttttgaaagcgcatttacgtgttcttgcagcggctgtgaaggataagcttccggtggagggatactttgcgtggagtctgcttgacggttttcagtggagtcgtgccggccctcgctggggcttagtacacgtggattttgaagctgcgctggcgcgaactccgaaagagtcctttgccttcctgtcgcgcgtaattgatgcaggtgccgtgccgaacccggatgcatggtga

SEQ ID NO: 461 - DNA, 1578 bp, Artificial Sequence
  6xHis UPI0004DD62AC
atgcatcatcaccaccaccacgagaacttatatttccaaggctcaatggcgcaagaagcgagtatgttcagcgccaacgatctggtggcagccaaccatagctcactggcgggtggagatctggaagtgaaagaacttccactgcctttagattttgattggggcgcagcgactgctgcatatcagattgaaggtggtgcctctcaagatggcaagggtaaaagtatctgggacacctatacccatttagaaccgtcacgtaccaacggccagaacgctgatgtggcatgtgaccactataacttgatgccccaggatgtggagttaatgtcgtcactggaaatgggcgtatatcgcttttcgattagctggagccgaatcataccgctgggcggtcgcgatgatccggtgaacgaacagggcattgcgttttatagcaacttaattgatcagctcctagcccgcaacattgaacctgtggttaccctgtatcattgggatgttccgcaggcactgtacgatcgctatggcgccttactgaatacggatgagttccgtgcggatttcgaacgctatgcgcgcctgtgcttttctcattttggtgatcgtgtgaaaaaatgggtgaccttcaacgaaccgtacattattgcgattttcggtcatcttaacggcaccttggcgccgggtcactgcgcggaacgcggtaataatacgaaaaatgagccgtggcgtgtaggccatacgctgattctgagccatgccagtgtcgtgcagatctacgcatcagagtttcgaccgacccagaagggctccatttcaattgttttaaacggtcacttttacgagccgtttgacacctcgaatccggcagatgttgaggcagcggaaacccgcatgattttttacatcggctggttcggtgacaccatcttcctcggcaaagattatccgccggaaatgcgcgaatatttaggcgcgcggcttccgcaatttacggaagatgagcgcgaactgcttcgtcgcacggccccgatcaacgcattttacggcatgaaccattactcaaccaaatacgctcgcgctctgcctgatccgccagcagaagacgattggacccgtaacatcgaagaaggctccgttaacagcaagggagaagaaattggcccggccagcgcgatggcatggttacggattgcgcctgagggatttagaaaattgatgaattgggtctggaatcgctatcgcctgccgattattatcacggaaaacggttgcccgtgcccaggtgaagatgacgtggaacgtgccaaggatgattccttccgtcagcgctatatcggtttatatctggatgcgatttcacgcgcgatttatgaggacggagtgaaagtgcagggctattatgtctggagtctgatggataattttgagtggagtgcgggctttggtccgcgctttggcgttgtccatgtcgactacgaaaccttagtgcgcaccccgaagaattcagcctactacttacgagatacctttaaacgccgccgtaccgttgtaggcagtcagaaacaggccacctga

SEQ ID NO: 462 - DNA, 2220 bp, Artificial Sequence
  6xHis UPI000507F00A
atgcatcatcatcatcatcacgagaacttatattttcaggggtctatgaaaaaaatcctgctcgcaatcggcgttattaccattatgttgagctgtcaatcatccacggataatccgaaaaacatcgatggcaaagatgcagagattgcggaaaaagtcgaacgcctgatcggtgagatgacgttggaggaaaaaatcgccgaaatgactcaggatgcgccggcgaatgagcgtttaggtattccgtacatgaaatatgcggaagcgctgcatggtatgtggcttgtgttggattattatggcaacactactgtatatccacaggctattgcagcgggatcgacctgggatccggagttagtgaggaagatggcgtcccaaaccgcggtggaggcgagaaccctgggtgtgacgcattgctactcgccgaatttagacgtgatttcgggcgacccgcgttatggccgcgtggaagaatcatacggcgaagatccgtatctggtaagtcgtatgggcgttgcgttcatcgaaggtctgcaaggcactggggatgaacagtttgatgagaaccatgtgatggccaccgccaaacattttattggctatccggagaaccgtcgaggtatcaacggcggatttagtgacatgagtgagcgccgccttcgtgaggtgtacttgccaccctttgaagccgcgattaaggaagcgcaggtagcgtcggtgatgccgggccaccaggattataacggcgttccgaaccacatgaatacttggttactgaaagatattctccgcgcggagctgggcttcgacggatttattgtgagtgacaataatgatattgcgcgtttgggcaccatgcactttatagcagaaaatcggaccaagtctgcgatcctgggtttgaaagccggcgtggatatggatctggtcattggcaaaaatgaaaagctggcagcatacaattcgaatgtgcttaaagataccgtgacccagaatcctgaattagaaaagtatatcgataaggctgcctcccgcattctcaccgcgaaatataaactgggcttattcgataccgaaccgaaggagattgacaccgaaacggtgtacgcgagcacagaggagcatcaagagtttagctacgaaatggccaaaaaagccatgatcctgttgaagaacgaaaacaacctgttaccgctggatattaacaacattaaaagtctggcagtgattggtccgaatgcgcacgaggaacagccaaagaaaggcacgtacagccttctgggaggttattctggcctgccgccgtactatacctctgttcttgagggcctgagttcgaaaacagaaggaaaggtgaagatcaactatgccaaaggctgtgacctgttaagcaacagcaaagagggttttaaagacgctgtagcggcagctaacaaaagcgatgcggtggtcttagtcgttggcggttcgcgcaaaacaggtggcgaaggggctgatcgtgccaacctggatctgtacggagtgcagaacgaactcgtggaaaccattcataaaaccggaaaaccggtaatcgtagttctgattaatggccgtccgctcaccataaactacatcgcggaaaacattccgtctgtactcgaaacctggtatttaggtatgcggtctggagatgccatagcggatgcgattttcggggatacgaaccccggaggtaaactcaccgtctcttttccacgtgatgtcggacagttacctgtgacttatctggaacgtccggactttattggtagtggcaaaggcctgtataaaaatgcggataaaacgccactgtttccgtttggttacgggctctcatacactaccttcgcatatggcaagccttaccttgagaacaacacgattaaaaccgatggcagtaccaccgtgtcagttgatattaccaacaccggtaagcgcgagggagacgaggtggttcagatgtatgtacgtgatgactttgcaagcgtgggccgctatctgaaaatgctgaaaggttttgagcgcattacactgaagccaggcgaaaccaaaaccgttaattttgatttgggctttgaggaattgaacattctgaatcaggagatgaagaaagtcgtcgagcctggcacctttactatttccgtgggcgcgtcgtcgcacgaaaaagatctgcaaaaaatcaccctgaaagtgcaatga

SEQ ID NO: 463 - DNA, 2235 bp, Artificial Sequence
  6xHis UPI0005CC42CA
atgcaccatcaccaccaccatgagaacttgtattttcagggaagcatgtttgaccctgtgaccatcctgaaacagttgaatcgcgaagagaaagtccagctgctctgtggcttagatgcatggcaccttcatggggtagaacgtctgggcattccttcgattaccttaactgatggtccacacggagtgcgtctggcacagtctcacgatgttttcgatagtgttgacgctaccgtgtttccggtggaagcagcaatggcggcgacctggaacgtgggtcttatcaaagaactggctggtgctatcgccaaggagtgccagcaacttggggtatcagtcttacttggtccgggcgtgaacggcaagcgcagccctctgggcggtcgtaacttcgagtatttctcagaagacccgtacctaacgggcgcgatggctagcaattttgtggaaggtgttcagagccagggcgtcggcgcatgtctgaaacatttcgcgggaaatgaacaggaaacccgccgttttctgattaacagcgtaattgacgaacgtaccctccaggaaatgtatattgcaccgttcgccaaagccattcgcgaaagccgcccctggacggttatgggcgcttacaactctgtaaacggccagtttgcctgccagaatagccatttgttgcaagacattctgcgagatcagctgggctttgacggcctggtgatgagcgattggggcgctgtaggtgataaagtggcgtgccatcaacatggcctcgatcttgaaatgccgggtccggcggatagagatcagcaactgttggatgccctggataacggcgatatgagcgaggttgtcctagatagccgcgtgctgaaagtgttagaactgatccacaaatccgtgacacataagagggacgttcaagtggacttcgaacgccatcacgaacttgccattgaagttgcttgcgattcagcggtcctgttaaagaatagtggcaatctgccgctggataaatctcgctctattggtttaattgggcagttcgcgaaacatcctcgctttcaaggcggtggcagcagccatatgaaccctcgtcatcttagcaacgcatttgaagccttttgttcgcgtgcagaggtgtcctgggctatgggctatgaagaactcgaaatgaccgatgaaatgctgcgtgaagcggtcgcgctggccaagcgcgtggaccaggttgttctattaaccggtactaccgatgcgctggaatccgaaggctttgatcgtagcaatatgcgtttgccggaggcacatgtggagctgatcaaggctgtgtaccagaccaattcaaacgtggtcgtggttatgtacgccggaagcgcattagagacccgtcaaattgaggattatgctccgtcgctgatgcacgcctggcttcccggggaaggcgggggagaagccctggcgcgcttattatttggcgaggtaagccctagtgggaagttgtcagagacttttccagtgcgcctggaacacaatccaacttacgaatcgttcccgggtaacaaagcagacaccatttacaacgaaggcatctttaccggctatcgctattacgatacgaagaaactgcctgtccaatacccgttcggctatggattgagctacacctcctttgcgtacagcgacctttcttatgacgcctcttgccgcgaagtcgcagtaaacgtgaccaacattggggatatggccggtgcggaagtggtacaggtctacattcatgatgaacactccactctgcgtcgcccagatcaagaactgaaaggttttgccaaggtcatgctgcagccgggtgaaacccagcgagtgagcattgcactggacgaacaggccttcgcatacttcgtgactcacttacagcgcttcgctgaggagtcagggcgtttcgaaattcgtgtgggcagctcaagccgtgatatacatgagagcctgtggattgaactggaaagtgatattgaatgccgtcagattccgacgttaaacgataccgtagaagattggctgcgtgatgaccgtacccgtccaattctggaagatgctttcgctcaggtcggctttactaaagaccatagcttttacgcgctgacacttgggtttccgatgaccctcctgaagaaattcatgccaatgatgggcctgaccgaacagcagtgcgaaagtctcaaagacaagttagggctggaatga

SEQ ID NO: 464 - DNA, 2031 bp, Artificial Sequence
  6xHis UPI00063E4005
atgcaccaccatcatcatcatgagaacctttacttccaaggttcgatgggcgtgggcgcttgtcccaaacactttgtctgtaatgatagtgaaactctgcgtcacttttatgatgttcgacacagtgcggacagccgtacactgcgtgaggtttatctggccgcgtggcaacacctgttacgcacgagcgatctggttggaattatgatggcagaaaaccgcccgttaatggaaggggttttacgcgcccaatggggttataaagggatcaccatgtcagattggttcgccgttcataacaccgccgttccgattcaggcgggactggatctggaaatgccatttccgatctttcgcggggcacgcctggtaaaggcggttgaagcgggagaagtggcgattggtgaagtggatgcgcgcgtcctaaaaatgttggaagcctgtcacggcatcagcaccgagaaaagtattgtgaatgaaaaaactaaccgcttggcgtgggaactagccgcaagtggcatcgttttattaaaaaatgagcaacaggccctgccaattgatctcacccagagctcggccgatcgggtggcggtaattggagaatttgcgcgtgatccggtgattaccggtggcggctcagcgagtagcacccctcaataccgctcttcaccgattgatctgtggaaggaagcggctgataacgccgagcgtgttcgttgctcccccggtgtgcgtactcgccggattaaacccgtagcagacactgataaactggttgccaaagatggccgaccgggtgcggacgttacctattataacgatgacagcccggaaccgttgcttgaagaacatcaagccaaacctgtggtttggatgctcggtcaatttaaaccagggctgaaagtgccgggcagtcgccttaagattaccaccaacctgacccctagcacctcaggcgatcatacgttagctattcgctgcaccggcgcatttaccctgtccgtaaacggtgaaactgtgctaacgggcagcgacaaaggtattccgacggaacagtttattttcaatcatattctgcttgaaaccggcacccaagtaagcatggaagcaggtgtgagctacgatatccgtttagatatggccggtccgccggaattagtcattggcgagccgactccgtatgctgctagcctgtgcttcgaagaagcgtacgatgaacagcaagcaatggcaaatgccgttgccctggcgcgaacaagtgatgttagcgttctctacgcaggccgtgacgagcagtatgaaagtgaaggctttgacttagatgatattcggatgccggctaatcaagcagcgctgatcaaagcggttgcagcaaccagcaagaaaacagttcttgtgctgcattgtggcaactcaatagatgtgtcagctttcgtggatgatgtcgacgccgttgtgctcgcccactttccgggaaaagaaggcgcacgtgctgtagttgatgttttggctggcgcggtgtgtccgtcaggacgtttagcgacgacgtggttcaaaacattggaagatgctccgagctttggtcattttccggcccgaaagctagaggatggcagcgtacgtatcgaatatgccgaaggtgtagaagtgggctatcgtagttcacaagctgccgcgggtgatcgcgtgcggtggccgttcggtttcggtctgtcatacacctcattccatgtgacagttaaaaataccggacgggtggcaggtcaagaagtcgtccaactgtatgcgagcccggcgaaagaaaccgctgtgagccgtccgggcaaagaattgaaagcttttgataagtcgatgctgcagccaggagagagccgcactgcggaactggccgtcgatctgaaggtagcctgtagctactgggatgaaaacgaagtagcatggcgtatggaaccgggtacctatggagtgctggtaggcggacatgcggtgcccttttcggtcagtaaaggcagctcgtggaaccatctgtga

SEQ ID NO: 465 - DNA, 1437 bp, Artificial Sequence
  6xHis UPI00073C6CD3
atgcaccaccaccaccatcacgaaaatctgtatttccagggctcgatgacccgtccgttcccgagacttcccgcagggtttcgctttgggtcagcgaccgcggcctatcaggttgaaggtgcatgggatgtggatggcaaaggccctagtatctgggatgaattcacccaccgtggaggaacagttcgtcacggccataccggtgacgtcgcgaatgatttttaccaccgctacgcggaagatgttgctacggttgccgcaggtggtgtgcatgaccatcgtttttcaatttcatggccccgtgtggttccggcggggaccggtgaagttaacgcggccggactagatttctatgaccgcgttgtcgatgcgctgttaactgcgggggttcaaccggttccgaccctctatcattgggatctgccgcttgcgctacaggaacaaggcggctggttcgcgcgggcaacagcggatgcatttgccgaatatgtagcccatgtggttgatcgccttggagatcgtgtgggcacctggctgactatgaacgaaacgtcagtacacacactgtacggtcatggcttgaccgatcatgcaccgggcctaggtctgggagttgacgcaatgttagcagggcatcaccagttgctcgcccatgcgcgtgcggtcgaagtgttacgtgcggcggggccctcgcgtgtaggcatcgtcaaccagcattaccctgtgcacgcggcaagcgatgatccggcagatgtggaagcagcagccgcgttcgcggctttgactgtgtgggcttttagcgacccggttttagccggacgatacccggaaggcgtggcggaaccgctggccgatgcggtggcagcacatggaggcgacctcgccgcagatctggtacgtattgcggcaccgttagacgtatatggggtaaactattacgagccgaccatgattgaagcccctcgtgcaggcaaagattaccggggcgtgctggaagtggacgttccagaaggcctcccgttttctccggtgccatatccctcagcggaacgtaccgatttcggctggagtattgcgcccgaaggtcttacccgcgcccttgtagaactgcgtgatcgttatcccacactgccgccggtagtggtaacggaaaatggggcatcgtttcatgatggtcctcctgatgccgaaggacgtgtacgtgatccgcgtcgcattgcatttttggcggcgcatctgcacgccgtcgaagatgcagttaccgccggagtggatgtacgaggatactacgtctggtccgcggtggacaactttgagtgggctgcaggctacgatgagtcatttgggttagtacatgtcgatcgtgacaccttggtgcgtactccgaaagattcatgggcgtggttacgcgacgtggttgctgcgcaggatgcctga

SEQ ID NO: 466 - DNA, 1767 bp, Artificial Sequence
  6xHis UPI0006C024BB
atgcaccaccatcatcatcatgaaaatctttacttccagggctcgatggtggatctgcgtggcaatccgttctatctggacgaagccggagaacgctgggttaaagaaaccgaagcggctatgaccccgcatgagaaagtgtgtcaactgttcgccgatccactcatgggaaaatcacgcgaagaactgattcaatttctagaggagtacccgcttgcagcaatcccgtttcgcgccgtactatacggtaatgaggaagcacaggatatcatggcagaactgcaggagagggcgaaaatcccatatctgtacgcgggtaattgtgaaagtggtccgaacggggcgctgaagggcggtacgttagtagcatccggtgcacaggtacgtgctacccgtgacgcgcgctacgcctatgaagtgggccggattactggttcagaaaccagcgcggtaggctataactggacatttggcccggtgggtgacatttatggcaactggcgtaattccctaataaacacccgagcgtatggctctgattcccagtttgttagcgattgcgtggaagcgtataacaagggctgcatggaatacggcgtggtgccttgcctgaaacactttccgggtgatggttgggaagaacgggaccaacatctggcaatcagcaataacggccttacctgcgaagaatgggataaaacttatggtaaaatataccagaccgccattaatcatggtgtactgagtattatggcggcgcactttacgctgccggcatatcaaaaaaaactgaaccctcagctggaagagcgcgatatgcagccggcgtgcttgagccgcgagttaattggcggtttactgcgcggccgcctggggtttcatggactcgtggtcaccgatcagaccaaaatgatgggctattacggtatgtcacgtttggatgcaatccctctcagcatcgcgtgcggttgtgatatgatcctaggtataaacgatattgaagaggatgtcgaggcgatgaaagccgggctgaaaagcggcattgtaacagaagagcgtcttacagaagccatttatcgcattctcgcgtgtaaagcagcgattggactgcatcgccgtaaagaatcgggctcatttcacccggggaaagaagcattagcgcgtatcggatgccgcgagcatcttgaaattgcgcgtgaagcgtcacagaaagccgtaacgttggttaaaaataccaaaggccagctcccactgtccccagaggtatataaaaagattggcgtgtttgtgctttcaggaaacgtgggcagcctgaatagttcgtatggacagggggtgcagagtggtggtagcgatcagatcacggaacgtattctggccgctcttaaaaaatatggttatgaaccggaactgatggttagctcagtgaataagggcaagattgcagattttaaggccaagtatgacgcggtgatgatctttgccgatatcacatcctttgcccaaaccaactcggtgcgcctgttatggccgcatccaatgtcatcttgttacccgtggtacatccacgacgtgccgaccgtgtttaccagcttcaattacaccaatcatctggtcgatgtggctcgtgtgcctgcgttcattaacgcttacaacgatacgccggaaaccgtcgatgagacggtgaaacgaattgcaggcctggcaccttttgaaggcaactacgacgaagatgtttggtgcggaatgtgggatacccacttttga

SEQ ID NO: 467 - DNA, 1431 bp, Artificial Sequence
  6xHis UPI000688E74D
atgcaccatcaccatcaccatgaaaacctatactttcagggctctatggccgaaacccctgcggctcttggtgcaacttttccgcgtgatttcttgttcggcgttgcaaccgcggcgtaccaagtggaaggcgcactggcggaagatggccgcggtgagagtgtatgggatcgcttccttcgtgaaccgggtcgtgtggtggacggcagcgatggcagcgttagcgcaaaccattatcatcgttggcgtgaagatctcggtattatgaccgagctagggctgagcgcgtaccgctttagcgtgtgctggtcacgtgtgcaacctactggttctggcgccgtgaacgaagccggtcttggtttctatgatcgcctggtagatggactgcttgaacgtgggatcgaaccgatcgcgaccctgtttcactcggatatgccggcagcgcttatggagaacggcggctggtgcgctcgtgagacaagcactcgttttgcggactttgctgaacacgtagcgcgtcgcttaggagatcgtgtccgttcatggttcaccattgccgagccgtacactttaatgcgccactcatacgttcttggcgagcatgcaccgggtttccgtctttcgacaggagccgcattaccggttatgcatcatttattactgggccacggtctggcgacgagagccatacgcgcccatagtaacgctcgtattggtctgaccaatcattcaagtccgtgccgtccggcctcgaatgccccagaagatcgagcagcgactgttctgttcgatgccctaaggaataatcttgtgaccgacgcggttctgctgggccgatacccgaaagaattagaagccttgcccgatgcaaactggtcagcagtgcgagagggcgacctggatattattaaagcaccgatcgactggctcggcctgacttactttcatccattaaccgttaccgcgttaaaaccggcggcgacgcctgcactggaaccgttcgaagtagaagtcactggtggggccgctgaaaccacaatgggctggccaattgtaccgagcggtttgggtgaagttctgacggccctgcgtgaccgctacggtgataaactgcctccagttgtaatcaccgaaaatggctgttccatgccggatcagttaagcgaagacggccgcgtggacgatcctggtcgtattcgttttttaagtggacatctgcaggttctgactgaggcgatgcgctctggcattcgggtggatggatacttcgtatggagctttctggatcattttgagtgggaactgggctatacgaaacgttggggaatcgtgtatgtcgattttgccacacagcaacgcaccttaaaatcatcagcacgctggtatcgcgagctgattgaaagttggcgatcagccacagggcaagtttga

SEQ ID NO: 468 - DNA, 2367 bp, Artificial Sequence
  6xHis UPI000822FAB7
atgcaccatcaccatcatcatgagaacttgtacttccagggcagcatgaatattgaagatatcattaaaaaaatgaccctgcacgaaaaggtgatgttttgcactgggaaaaacagctggcgtactctggatctgccgcacttaggcgtacctagcgttttgatgagcgacggcactagcggtgtacgttttcagatgggcagcgatgaccccaaaccatccaccttttacgataccttaagtgggcggtttgatgatgaaaaagcgctaaacaatacctgcgaggccaccgcgtttccctcgggcagtgcgattgcatgttcctggaacaaagacctgattcgtcaagtaggtcgcgcaatcgccgcagaatgtcgtggcatcggcattcagctcctcttgggtccgggaattaacattcgccgccacccgttgacagcgcgcaatttcgaatattatagcgaagatccttgcttggccggcgatatggccgctgcaatggttgaaggcgttcagtccttgggtgtcggaacctgtatgaaacactttgcgtgccataatagcgacacccgccgcactcgtgtcaatgttaaagccgaagaacgtgccctgcgtgagatttatctggccccgtacgagcgcgttgtcaaaaaagctgatccgaccagcgtgatgtcggcttataacaaaattaacggccaggaatgcagtggggataatcgctatgttcgggacatcctgaaaaaagagtggggcttcgatggctgcgtcatctgtgactggggcgcggtaaaggactcagtggaagcgtcgaaaggcggtattgatctgcaaatgccattatcacccgctagcagcaaatacttggaagaagccgtgcaggatggtcgtctagatgaggcgctgctggatgaacgcgttaggaatattctgaaactggtacaacgcctgagcgagagtgcaccggcagattccgataccgaaccggatttcgaccgtcatcataaactagcgcgcgaagcagcctcagagtctatggttctgctgaagaatgatcgaattttaccgatccgtcctggtttcgccaagaagttagcggttgcggggctacttgcggaacagccgttataccaaggaaccggatgtgccattgtgcgtgcgaaagaagttgatattccgctgaccgccatcaagcggtatgcggatgaaatggatatggaagtgacctacgttcctggctatggcgcggatggcacaatcgatcccgatcagttgaaaaaggcagagttggccgcccgcgaagccgatcttgtgctcgtgttcgccggttcatttctgccggaagaagacgacgattacaatcgcaaaaacatggcgattcaagagggtcatgaagccctcattcacgcggttagcggagccaatgaaaatacggttgtcatcctgagtaacggcgatgtgtgcgagatgccttgggaggccgaagtcaaaggcctgttagatgtttggtactccggtgaagggatgggacaggcggtcgcggatatactctttggagaatccaacccttctggacgcctgtctgcgactattccgtttcgactgtcggatacgccggcctatttagagtttccgggcaacacgttcgatttaacttataatgagggcatctatgtgggctatcgatactacgataaaaaagatgtcaccccgcgctacccctttgggtacggcttgtcatatactaactttcattactcgggactcaaagcaggcgatgactatcgcgttccaggtacctatcgtgtcagtgtggatattaccaaccgtggcgcctatgggggcaaagaggtggcacaactctatatttctcaggctgcccccggcttaccgcgtccggtacgcgaactgaaggcattcgagaaagtttacctggagccaggcgagaccaaaaccgtgacgtttgacttaaccgagcgcgactttgcatattatgacccggaatcggcaggctgggtggtagattcggatacattcatgatcgagattggtgcgtctagccgcgatattcgtgaatcccataagctgcaggtgtacaacgaaaaaaaaccggttcgtagattacgtaaaaactgtgggtttgcggagcttctcagtaccgagcagggccgggaaattttttacaatttcctcattgaacggaagttactgacccgtgatcagattaatcctgaaacagaaaaaagcttcctgtgggccttttggccggtgcgctgtttccttgatatgggtgcgggtgaaatgattacctacgagatgattgacgagctgattgaccgcatcaatcaagccttagggaatggatga

SEQ ID NO: 469 - DNA, 1341 bp, Artificial Sequence
  6xHis UPI0009284E74
atgcaccaccaccatcatcatgaaaacttgtattttcagggcagcatggtaaacgaccccaaaaacttcctatggggtgtagcgacgtctgcttaccagattgaaggtgcgtatgacttgggtggtcgcaccccgagtatttgggatacctttagccatactcctggcaaaacctatgaaaatcaaaccggagatcgcgcctgcgatcattatcagctatgggaacaggatgtggaactgatgaaatctcttgggataaacgcgtatcgtttcagcatttcgtggagccgtgtgttccccgaaaacagcaaggaatttaacccgaacggcctggatttctaccagcagctcattgataagctgctcaaggtaaacattcagccttttgtaacgttatatcactgggacctgccgcaatatcttcaggataaaggcggttgggcgatccgtgaaaccgcggagcgttttcgcgattatgcatattttctggtggagaaattaggcgatcgagttagctattggaccaccataaacgaaccgtcagttgtggcctacgccggtcactatcatggcgtgcatgccccaggtattcagtcaacggatcagacactgaaagcgctgcatcatctgctgctggcacacggtctggcaattcatgcaattcgctcgcgtttcgaagtgaagttaggcattaccctgaacctgtcgccggtgtaccccgatcatccaagctcggtgctcgatcagaaggcgagttacctctatgacacgtatgtgtatcgctcaattctggacgccctgtacctgaaaaagtatccggaggaaatggatatgcaggaagtggtaaaactgggggatatggagatcattggtgccacgaccgattacctgggcgtcaactattacaccaaaacgatggtgtgcttcgatgagaatcagggcctgatgcaggcccgtgttgttcctccgatccgtaatgcgtactctgatctgtgggatttttacccacagggtttatcagaagtactggaacgcgtctgctcgaattaccagcctccgcgcatttatattctggagaacggtacctcgctggaagttgaagaagatgatcaaggccgtatcgcgtatatccgtgcccacctgagtgaaatgcgtcgctgcttggaaaaaggcatcaatgttcagggctacttttattggtcctttatggacaacttcgaatgggcgtacgggtactctaaacgctttggtttatttcatgtggacttcaagacctttgaacgcattccgcgcgccagcgcacgttggtatgcgcatgagattgcccagaacaaagattga

SEQ ID NO: 470 - DNA, 1323 bp, Artificial Sequence
  6xHis UPI0009CB461D
atgcatcaccaccatcatcacgaaaatctgtacttccagggctcgatgaagaaagaacgcaccgaaaagatcaatttcctgtttccagcaggatttcgctggggctccgcgtcgtcagctttccaggtggaaggcggttgcccgcatcatgatttctacgattgggcgttaaagggccgtattaaagacggaacctctccgatcgatgcggttcgattttgggaatactataaaggtgacattgcactgatgaagcgcatgggtcataacgcagcgcgtatcgggattgaatgggcccgtattgaaccgagtgaaagtgaatttgatgagaaagcactggcgcattaccgttccatcctgcgtgagatgcagcgctcagggattagcccgatgctgaccttgcatcactttgcgaatccgatgtggctggttcgtcgcggcggctgggaaaacccggaaacagctgaccgctacttgcgctttgttcagaaagcggccaaggcgctgggcgatctggttgatatttggattaccattaacgaaccgtcagtgtacgcggtgagtgcgtatctatttggcgaatttccgcctggcaaaaaatccttccgccgctgcctgaaggtcatggatgttatgattgatgcgcatgtacgtgcctacagtgcgattcacgaaattcacgccggaaaaaattgggcacgcgcgcgggttggtattgcaaagcatttacgtacctttgatccgctgcgtaatggcaacccgctcgataggttatccgcacgcctaatggacaaatatttcaataaccgctatctggagcgcattagcgcaaaaggccgtacgctggatctgtttggcatcaactactactctggcgacctcgtgaaatttccgatgaatctgctgacgcgcccggaattgtcgaaaaacaagctaggttgggacatttatccggaagggttgtaccgtgtactgcgccgctattgggacctgtatcgcctgccgatttatattaccgaaaacggtacctgcgaagatggcgatgagattcgtccacgctatattctggaccatctgtatcagctgcaccgtgcgtttaaagaaggcgtggaggttgccggctactatcattggtcgaccctggataactttgaacttgtagacggcctgatgagtcgctttggtctggttcacgtcgaccacggccatccgaaacgaaagaggaccctgaagcgttctggtctgatgtatggtgaaattgcacgtgcggggggtatcactggacgtattgtgagtaaatatgcaccggattggcgtccgtga

SEQ ID NO: 471 - DNA, 1422 bp, Artificial Sequence
  6xHis UPI0009C92D6A
atgcaccatcaccaccaccatgaaaacctgtactttcagggctcaatgaagaaagaaatcattttcccgaaaggatttctgtggggcaccgcgagtgcaggacatcaggtggagggcggaaacgaaaaatcggactggtggaagtttgaaagcgaaggcaaagtttacgatggtaccgtgagtggcaaagccgttgactactggaatcgctacgaagaagaccatgagatgatggccaaattgggctatcaagcctttcgccttggcattgaatgggcccgtgtcgaacctgaagatggtgtctttgacatgaaagcagtgcgccactatgagaagattctgcgtagtcttcgcaaacacaacattaagatttgcctgaccctgtatcattgggtactgccgttatggttcgcggaaaaaggaggatgggagcaccctgaagccgcggaccgctttatggccttttgcgagttaattattaaagaactgggtgagtatccggatttatgggtaaccctgaatgaaccgaatgtaccggcagctgcaggatgtctggcaggcgtcttcccgcctgaaaaaaaaagttttgcctcattttgcaaggttagcaatacgcttttgaaaagtcatgcccgctgctatcgtctgattcatgatctggtgccgaaaggtcctgatggttggccgtcgaaagtgggagttgcaaacgcgtatcagcatgtggcgccgtttggtaccccgggcttagcaggagcttatgaaaaggcactttcaccggtcctggcgtacggttcgtttaaggcatgggattactcagtggccacaggctggattgtgcctccattcggcctggagcatgtacctggtctgaaagatagctacgactattgcggggtgaattactacacgcgcatgtcgctgaaatttgacgcggcgaaaaccgacgacatgctcattgatattcacggcattcagccaggcatcgaaatgaaccagatgggctgggaaaactacccgccgggcttctttcacactctcaaattcgtctggaacaccttcaagaaacccatttacatcaccgaaaacggttgtgcagaccctcagcgtgatgacatcgatcgccgccgctacctgttagaacacatggcgcagattgcacgtgccctggatgcgggtatcgatgtgcgcggctattttcagtggtcctttactgacaatttcgaatggcgtgaaggcttcattaaaaagctgggactgatcgaatgcgattacgcggatccggagctgaagcgcattccgcgcgtgagtgctgccatgtacgcggacattgtgaagaaaaatggcattacgaccaaactgctcgaaaaatatgccccggattgcgctgacggtgtcttcggcgataagtggatggatcagtga

SEQ ID NO: 472 - DNA, 1374 bp, Artificial Sequence
  6xHis UPI0009D12B86
atgcatcatcatcatcaccatgaaaacttgtattttcagggctcgatgccgaaaggcttcccgaaagaatttttttggggaacggcaacggccgcataccaggtggaaggtgccgatgcagaagatggcaaaggtccaagtatttggacttccttttcacgccaaccggggcgcattgcagatggacatacaggtgatattgcttgtgaccactaccatcgctttgaggaagacctggcactcatgaaagaactcggggtcaacgcctatcgtttcagtatttcttggcctcgcgttttgccggaaggccgaggaccggtaaacacccctggaatggacttttatcaacgctgggtggaccgcctgctggaaaatcagatcaccccttttgtgacgctgtaccacggcgatctgccgcttgccttgcaggaacgcatagggggttgggcaggcgaagacatcgatcgctattttggagattacgcggcgctgatgtttcgcactctcggagatcgcgttacttactggatcacactgaacgagccgatgcgtttctccttcatcgcgtatggtaagggtgaatatacgccgggcgaacagaatctgaaaaccgcatttcttgtcgcccaccatttactccgcgcccatgcgcaagcaaccgcgcgtttacgagagctgctacccaatggtaaagtgggtctgatcaatgccgcgagttggatcgaagcagcgtctgaatcgggtgaagatattcaaaccgccttcattgcaaaccagctgcttcatgactggtttttcttgccggtgctgaccggcaaatatccggaagaggccgcacaatttgtccgaggattgggtttgctgccggtgtttgatccacaggaaatgtctcgtatcgcgaaagcgccggacttctggggtataaactactacacccgccgtcgtgtcaaaatggatatgtcccgccctatcttttttgcatacgccccccctgaacgtgaaaccaccgagtctgggttagaaatctacccgcagggcctgactgcattccttaaaattgcccagaaagaatacggttcgatcccgattttcgttaccgccaacggcatggcagataaagatgttctgtccaacggcgttgtggcggacgaacgtcgtattgcgtatctgaaatctcatattgaagccgttcagcgtgcgattgcggaaggcgtagatgttcgtggatacttcgtgtggtcgctgttagatggctttgagtggacccaaggatatgataagcgctacggcctgatttacgtcgattacgaaaagtccctgacgcgcattaagaaggactcttattactactataagaactatctggcgctgtga

SEQ ID NO: 473 - DNA, 2574 bp, Artificial Sequence
  6xHis UPI0004DCBED3
atgcaccatcatcaccatcacgagaatttatactttcagggctcaatgtcgcagaagcatacggtggggggagcggaactggtcattaacggtgcggaaaacgaagtcgtacagcacgaagctaccgcggcagccaaccccaacgcactgtcgtcaaaggaaattgcggatcgtcgggcggaatatgatacctacgtcgagacatggaagttggagaatccgcgcttagccgccagcctcagcagcgatactgtggaagcgtactgggaacagttgctcagccatgtgtcgccgatttattcgcgcactagcggtcagcctgtcgcctcgaaactagattatgtccagaagcgtcgctccactagcgaaagcgaaatctccaacgcccgtcagcttgttcagattgcaatggaggagacccgccagaaaagtttagagattagcaaaaacccaggccgaaatcactattccctaaaagggagcaacggcggcaagaaaggttcgaagcgtgacctcgtgcgcccgatgattacggaagaagttcgtaaagccgccgcactgatcgcggagttagaagcccaagatctcgaccgcgagggtcggctgtataaagaatataacattacgattaaagaccaggcgaccggacgtaaagaacagaaaattcagtcgtatcgttcccgtagccgccgtgcaggtgaatattggctggctcaactcggttcccaacaccctggccgttcaccgttccagaatgacccagggtataaggtgtttcgcaatgtccgtgattatggtgcacgcggtgatggcaaaacggatgacaccgaagccattaaccgggcgatatcggatggcaatcgttgcggggataactgcggctcatcgacggttaaaccggccaccgtttacttcccgccgggtacatatttggttacggccagtctgcaaaacatccatttcaagatgaaacgcgattcaagccaggtgggactgtttatggaaaatggcccggcctttctggtcgacacacagccagttaacagcgaagaacaagtcaccgtagttctgctgaacaccgcctacaccaatacccgtaccctggtagacagcaaatcgagcggtgcttacctgaatggtggatcgaacggctacgtggaatcgtacttcgtgggcaagacctactcagaaggcagcagtaagaacggtttcagcaatggcgaaactggggacgctaccggaatccactatagtatcccgcaggaactgcgctttgcattcgaaaaaaccgccggtgtgtactctcgctctcgcccccagtatctcgacgaaaacaattggatggtagtggaagccgcgggtgatggtagcaccgatgatagtgcagcactgtcacttgcgttcagtctgagtgcacagcagaaacgtccgctgttcgtaccccacggtgtatatatcgtcacccagactattgcgatcccggccggtgcagtgattgtaggagaatgctggccacaaattatggcgtccggcccaagcttccatgatattgatgatccgaccatcatgattaccgttggtaatccaggcgatgaggggggtgtggaaattagcgatctgttatttacggcccgtggtccgacggcgggactggttgccatgcagtggaacattaaggcagatgccgcaggccgcgcagcaatgtgggattctcattttcgcatcggcggtgccagcggcaccgatctgagaccgccaattgcgcagaatagccttgtgaaatttggcttaaacgtgttgcagggccattattattttacgtctgtggtaacgcgaacttcggcgctggacaaccagcgtatgcgtcgtgttgtttctatatgtttgcaggcgggtatgagcctcttagggttgaaaggtggtggctactatattttgaaaaacacgttatcagaggaaccttgcaatgatcgtgaagcgcatagcactgcacgctggctggatggacagtgttacgccctgcatagctctggtcctggcaacaccggctacacggttgaatcaagcaccatattttcccgtgaaggcaacgacattattgcgggcctttttaacggtaccattgatcagaatccggagccgacagcatataaggacgaactcgaactgctctatggctcctcgcaacgctgtcaggatctgatgggagattactcatcgcagcgctatggcgatgtcgaggaagaagaaggtcatgatccggccgagtatgcggcaggtggcttagatctgcagcagaattgttttttcaacctgcccgttctgagcgtagatgcatggacggaggatgatcccgtcggttcaactccgtgtgtttttctgcgccggggtctgggcgataaggtgggagaaaacaaacttccggactggatggccgaggttttcacccccgatttttgctcgacgaagtgtcgtggtcagaaatgtcgcgacgacttagagccgtgtaatcgtcgtaacggcgatcctctgtgcctcgcgggtaataaaacacaagatcgcacaagtaaatga

SEQ ID NO: 474 - DNA, 2271 bp, Artificial Sequence
  6xHis UPI00050E0BE3
atgcaccatcaccatcaccacgagaatctgtactttcagggttcaatgaatcagaaccaattcaacctgattgcactgaacctgaatgagaaacagcgcctgatttttattattctgtttatccttaccctgcaaagctacgcccaaaacaattataaatggttcgatgaatcgatcccgttcgaagagcgtgccaacctgctggttcaagcgatgacgctggaagagaaatgtagccagtttgtttcagcgagccccgctattccgcgtctcgacgtaccggaatacaactggtggaacgaatcgctgcatggcgtggcccgcaacggtaaagcgacgatctttcctcaaggaatcgcgatgggtgcaacatttaatccggaactcattaaagaggtttcaaccgccatttcagatgaaggccgtgcgaaattccaggtgagtaagtctattaacaaccgcgggcaatatgcgggtctgacatactggagcccgaatgtgaatatttttcgtgatcctcgttggggtcggggtcaagaaacctatggcgaagatccattcctgacctccaaaatcggtattgcatatgtggaaggtctgcaaggagatcatcccaaatacctgaagaccactgcatgtgctaagcattacgcggtccattctggcccggaagaattacgacactcattcaatgccaatccttcaaaactggatttgaatgaaacttacctgccggcgttcgaggccctggttacgcaggcaaacgttcaaggcgtaatgggtgcgtataatgcggtatatggtgaaccgagcacgagttctacctttctgctcgatgacattctgaaaaaacagtggggttttaacggttatattgtaagcgattgtggcgcgctgggggatatcctgaaagggcataagaaagcgaaaacggtggaggaagcggcggcgctggccctaattgccggtgttaacctcaattgcggttgggtatataacgaaatccagtcggcagtggagaaagggctgattagcgaatcacttttggacgaacgcttaaagcagcttttcctgatccggttcaaactgggttttttcgataaagacgaaagcaatccgtataatagcatcggtacggaagtgatcaactccaaagaaaacaaggaactcgcgcgcaaagtagcgcagcagagcattgtgcttctgaagaacgacaacaacgttctccctctggacaaaaaaattaaatccctgtacgttaccggcccgttcagttcttcaagcaatatcctcattgccaactattatgggatgagctcaaatttagtgacggtgctcgaaggcgtgaccgaaaaggtcagcttaggcacgagcctgaactaccgccagggcgtactcccgttccagaaaaatctgaatcctttgaactgggccccgaacgtggccaaaactatagatgccaccattttggtggtggggatttctaatgaaattgaaggggaagaagttgacgcgattgcctcagaacataaaggcgaccgtaaagatctgaaattaccccagagccaaatcgattatattaaggaaattagtgaggtcaaaaagggcccactggtgttggtaattggtactggctcacctgtgtctttagaagatgtggaaccgtatgttgatgcgatcgtgctgatgtggtatcctggggaacagggcggcaatgctgtagcggatattttattcggcgatgtctcaccaagtggtcacttgcctatcacctttccgaaaaacgttgaccagctgccggcctttgatgattactctatgaagggtcgcacctacaagtacatggaaaaggagccaatgtacccgttcggctttggtttaacctacggccagacggaattcagtaatgcgagtggctacctgaaaagtatttcgaaaaagcaggatttctcgttttcggtggatatcaagaacacttccaaagtgaactttgaagacgtgattcaagtgtacctggtgcccgaagacacccaggggtttttacccaagtactcactgaaagcgttcaaacgcgtggaactgctggccggtgagactaaaaacataagctttaatatcagcaatcaggacttttatcagaccaacctggagggtgagaaagcctggataaagggcaactacaaactgatgattggaaacgcgcttccgagcaaaaagagccttaaattaggggccgcgaaaccgatcgaaatcacgattaaacttaagtga

SEQ ID NO: 475 - DNA, 1623 bp, Artificial Sequence
  6xHis UPI0005B075C8
atgcatcatcatcaccatcacgagaacctttatttccaaggttccatgcacgtcactctgcagtctgtactgaattcactacaccttggtccgcctcagaccgcccagagccgtctggcgcctaatctggaaggtgtgggcgaagacgtgaccgtcgtttacagatatcgtaaacagcgcggcgtgaacctgggaagttggtttgtactggaacgctggatcacggatgccccattccgttatgctgtggcgcccggtcaaagcgatttggatgtagccaaaggcagccacgctaaagaaattctggagcgacattgggatagttggatcaccgggaacgatttcaaatggctggcaagccgaggtatcaacgcggtgcgtataccgattggttactatcatctgtgcggtatcgatagctcactgttacagaaaacagatttccagggcttggaagaagtgtttcagggagcgtggcctcgtttagttcgcgccgtagaaaccgcgcaattgcacggaatcggtgtgttatttgatctgcattcggcgccgggtaaacaaaaccaggatagtcactccggtaccagttctccgcgtgtgtcattctttgatgaccgtttcaacctgcagctgaccattcgtgctctgtgtacgctggtgtcggcgattatccttctgcgctcggaacatgacccgccgattaaaaacgtgattggtgttgaactcttaaacgaaccgcgtcccccgagtcatcctgccctgaaagactggtatgtgaaagccattcaggaagtgcgtagcttagatccagtgctgcctatttacatctccgattgttggatgagcgatgactacgcgggcttcgttaagtcattgccaaaaagcactgccccgatatgtcttgaccaccacctgtatcgctgcttcacttcgtcagataactctacacctgttgctcagcatagcgcaagccttacggatccgaatggtagtaccccgcagacctttgcacgtgtggccggtatgctggaagatgcaggcggggctctggttgtgggggaatggtccggagcattaaatccgggtagtctccagggtcctattaatgaacgcgaagaacgcaaaagatacgtggccgcgcagttagcactcttcgaacgctactgcgccggttggtttttctggacttacaaaaaacaacaagctggtgatcaaggctggtcttttcgcgacgcagtggaagcgggggtcttcccgaactttgtgggtatgcgtcctaccaaaaatgtgccgattgacgatgccggtcgcaaaggcgcagcgctgactcgtgcaataggccagcatgtttcgtactgggctcagtatccaggacagtatgaacattggcgttttgagaaaggctacaaccaggggtggggcgatgcttataaattcctgctgaacaaggacacgaccctcgatgcagtgagcgaactgggctttaaaggtccgtggaaaaagaaacgcgtctacgaacacgggactgaatctgggtttagtaacaacgtgtgggaatacgaacatggctacgatcaggccgtgcgcgatgcgaacttagactttcagaatacctactgttga

SEQ ID NO: 476 - DNA, 2334 bp, Artificial Sequence
  6xHis UPI00063DF006
atgcaccaccaccatcatcatgagaacttatactttcagggttcaatgcacattgtatcgcgtcgcgttctgcgtgtctctcgtgttgttccgtcattggttcgccgcaaaacgggcagtagtggtctgacgggtacggagccaaaatccgtaaaacacctgagactggcatttgtgaatatggcaccatctccgctgaatctgctgttgctgggcgctgtgctgtcacagagtactgcttcagttatttccccacgccagcgtgttcccgatggcttcgtggcaaagagtgtatacccgacccctcatgggggatgggatcgtgattgggtcgactcgtacgaacgtgcaaaagccattgtagatcagatgaccctcgccgaaaaaaccaacattactagtggctctggctggtggatggaccaagatgtcgtttcagcgacactggcagcgccgctggcccttggaagcttaaatagcgcgtgggatgtagccgccgcgtacgggaacgtgatcgtcgttgtacagactgtgggccctattcttgtggaagagtggatcgacctgccgagcgtcaaatcggtgttattccagcacttgccgggccaggaggcaggtgaatcactgacgaacatcctattcggtaatgtatcaccttcgggccatctgccttatagtatcacccgtcgcgaggaggatcttcccgaaagcggtgtcaacgtgtggttaggacctagcgttggaccgcttggccgtaaaccgaaaggcggccgcaactgggaaggctttggtagtgaccctgtcctccaagccaaagctggtgccctgtctattaagggcgtacaagagcaaggtgtaattgccacgattaaacatcttatcggcaatgaacaggagatgtatcgtatgtataatccgctgcaacaaggcctgagtgccaacatcgatgatcgtacgttgcatgaaatctatctttggccgtttgctgaaggtattcgcgcgggttcgggggccgttatgacggcgtataatgccgtgaatggatcagcgtcagttcacaattcgcagatgatcaatggtgtgcttaagaatgagcttggttttcagggctttgtgatgagtgattggttcagccaaatgtcgggagtggatgccgcaatcgcaggtctggatatggcgatgccgggagatacccaagtacctctattcggctattcttattggatgtatgacttgacgcgttccgtactgaatggttcagtgccgatggacaggcttaatgatatgactactcgtatcgtggcgacttggatcaaatttggtcaggataaaggattccctaaagtgaattttcatttactgagcaacgatgccgtgggtgatttatatcaagcagcgtggcctttctcgcctcgtggcgttattaatgagtttgttcaggtgcaggcggatcacaacctggttgcccgcgaagtggctcaagatgcaatcacccttctgaaaaacaatggcagcctattaccgatcgcgacaagccgcagtatcaaattgacaggtggttctactggccagccgcaagacacgttctcggaaggactttatatcgattaccgctatctgaataaaaacggcataaaaccccgtttcccgtttggccacggactgagctatacctccttcaattttaccaatcccagcattagcgcagtgacgcagctgagccgcacccccccagcaccaccctcaagagccccggtgttaaactttaaccaggcgattcatccttggcaacagggtgtcgttccggcgggttttagccgtattttccgctacctttactcctggtgcaccgaaggagaagcaaagcaggccgtgcgtgacagggaagatggtaaaaaatatccttatccgccgggatatacaaccgtgcagccatcagcggttcccgcgtcaggcgcaagcggtggaaatccgcgtctgtttgatgtggcattccgcgtgtctgtcaccgttcgcaataccggcgccacccataccggtcgtgctagcgtccaggcttacgtgcagtttccggacggagggcctgaaacacctattgttcagttgcgcgattttgaaaagacctcgcgtctggcgcctggcggaagccaagtggttaccttagcgctgacccgtaaagacttgtccatttgggatgtggtgtcccaaaactggatagtcccctctccaggcggtcgctataaaatttggattggagatgcgagtgatcgcttatttaccgcctgctatacagacaccggccgttgtgagtcaggtttgcagtctccggtatga

SEQ ID NO: 477 - DNA, 2172 bp, Artificial Sequence
  6xHis UPI00076F8EA4
atgcatcaccatcatcatcatgagaatctctattttcaggggagcatgttctgcatccttttactgagcgcgctgaattacacccatgcgcagtcgaaaaccgacaaattgacagatgacaaaattagcagcattatcaagaagttgactttagaagaaaagattagcctcctgcatgcgaatggtatcttcagcgctggtggaatcaaacgcctgggtattccgcacatcatgaccgatgatggcccgctgggtgtacgcgaagatgtcctagaaggctggggccccgcgaatctgacaactgatagcgcaacttttttccccaatggtagcgcccttgcagcgacctggaatcccgacctggcgtaccgctacggacatgacatgggtgaagaagcgcgtgtgcgaggcaaaaacgttatgctggcgccggcatttaacatttgccgcactcctctgtgcggtcgcacgtacgagtactacagtgaagatccctttctgaatagccgtctcgccgtacaatcggtgcagggcattcagagtcaacacgtggcggcgtgcgttaaacattacgccgtgaacaatcaggaaatcgaacgcggccgtgtttcggtggatattgatgaacgcgcgctccgtgagatttatctcccagcgttcaaagcgtcgattattgaaggtaaagcctggaccataatgtcagcgtacaacaagctgcgtggcgtttactgttctgaaaatgactacctactgaagaagattttaaaaggcgaatggggtttcaaagggattgttatttctgattggggcggtactcatagcaccgttgctgccgcaaacaatggcctggatctggagatgggctcaaacccgccgtataatacctactacttcgctgataaactgctcgatagcgtgaaagcgggcaaagtatccgtaaaggtgatagatgaaaaagtgcatcgaatgctgtgggtactgtatcatacggatatgtcagctaacttaccgaaaggcagtattaacacgccggcgcacagcaaaactgcctatgatattgcggcggagtccatcgtgttacttaagaatgataagcatctgctgccactgaatacaagtgcgatcaaatcgctggcagttattggcgacaacgcgactcatacattccacttaggtggttttggggccggcgttaaagctaagtacgaaattaccgcattagcaggcctgaagaatcgtcttggcaactcaatcgatattaaatttgcgcaaggctactcgggcgcctacaagttcggcagccataccgagttcaaaccggatgcagccctgatccagcaggcggtagcaaccgctaaaagcactgatatggcaatcctttttgtcggcggcaaccgtgattacgaatcggaatcgcaagaccgcaaagacttgtctctgccgttcgcggaacaggccttggttgacgcggtaaccgcagcgaacccaaacacgattgttgttgtggttgggggcgcaccttacgacattggcaagattaaagaaaacaaccataccatcgtatggagctggtacaacggatccgagaatggaaacgcactggccgatgtgttaaccggcaagatcaacccctcaggcaaactccctttcacctttccggccagcctgaaagactcgccggcacatgctcttaacgcatacccgggcgaaaacttaaaggtcgattacaaagaaggcattttggtcggctaccgttggtttgacaccaaaaaaattgaaccgctgtattgctttggctacgggttgagttatacaggttttaagtactcaggcttctacaccaacaagaagtcgtataaaaccacggatcacattacagtgtctttaaaagttaagaatacaggcaaatatgcgggaaaagaaactgttcagctttacgtgtcaaaaaccggctcagtggtggaacgtgcggacaaagaactgaaagcgtttaagaaaatcagcgtcgcagtgggtgagaccgcggcggtcaccttatcaatcccggtgaaggatctcgcgtattacgacgtgaaaacttccaaatgggtcgttgaaccgggtaagtacaagctcctcgcaggcactagcagccgtgatatcgaacagtctgctacgattaccgtggactga

SEQ ID NO: 478 - DNA, 2301 bp, Artificial Sequence
  6xHis UPI0006C0FFEF
atgcatcaccaccaccatcacgaaaatttatacttccagggctcgatgaaacattctacactttcgttattaatttgcatcggtggttgcttctcggcatgcagcccgacaaatgagaaagtcaaccctctgacccaacacgaagatgaaataaccaacatcattgcggagatgactctggaagagaaaatcaacatgctgcatggtaagaatatgttcagcagcgccggtgttgaacgcttaaatatccctgatattgagtatgcggacggtccttttggtattcgggaggagatggaacctcattcgtggaatagcctgcacttgagcacagattcagcgacgttcttcccaacgggctccgctctggccgctacgtggagcaccgaaatggcgtacaagtatggagaaggaatggcagcggaggccaaactgcgtggcaaagatatgattctgggcccggctattaacatccagcgcattccaaccggcggccgcacatacgaatatcttagcgaagatccgctgcttagcggcgaactggcggtgaactatacattaggcgcgcaggatcatcaagaagccgtgtgtctaaaacactacgccctgaataatcaggagaacatgcgcgggtttgttgatgttaaagtgagcgagcgggccatgcgcgagatctatctggcaccttttgaagcggccgttaagaaagcaaatgcctatggtgtcatggcggcttacaacaaggtgagcggagaatggtgtagcgagaatgatcgccttttaaacaaaattctgcgcggcgagtggggctttaaggggattgtgatcagcgactggggtggtacccactctacgatcaaggccgcgcttggcggtttggatgtcgagatgcccaatgaccgctactttggcaaagcccttctggattctgttcaagccggcgttgtctctgaaaaagttatcgacgaaaaagtgcgcaacttactgcgtgtgcgcttagcaattccggcggtgccgaaagaagaagcgaatacgcagatgactagcctaccagcccagcagcagattgcatatgaagtggcgagtcgtagcatcgtactgttaaaaaactcgggacttctgcctataaacacagagaaagtgaaggatattgccgtgatcggtgataacgccgtgcgccacatggctacgggtggagttggcgcaggggtgaaagcactatacgaaattacccccttagagggcctgcaaaaagcctacgaagggacgaatgtgaaaataaaatacgcgcaaggctacctcccacaggagcgcagtagtcgtcataaacgcaatagttcggaaactgcgtcctccgaaaaggaaattcgtgaaaaatctgagcgcttagttcaggaggcgattgcgttagccaaagaagcagaccttgtaatttttgtaggaggcaataaccgcgaagtcgaaacggaaggctcagaccgcaagaatatcaccctgccgagccaccaggacgaattgattcaaagcattgcgaaagcgaatccaaatatcgtgagtgtgatggtaatcggaggcccggtcgatctccaaaccatcgagaaaaatagctcctccattctcgtgagctggtttaacgggagcgaaggaggacatgccctggcagatgtcctatcaggtaaaattagtccgtcgggcaagttaccgtttactttcccgatcaaactggaggacagcccggcatatcatctgggcgtctatccccagcaacagccggaacgtccgcgcgacgtctttgtagatttggtcaatcgtgataaattccgcgccgaacaaaaggcggaagcggattacgccgaagacatatttgtgggttaccgctggtacgctacgaaaaatatttcaccgctgtatccgttcggtcatggtctgtcgtacgccaattttcagtattcagcactgcaggcgaaaattaacaaatcgcaagttgacgtcagctttacgctggataacatcggaaaaatgaatgcggaggaggtggctcaagtttacattacgcgccctcaatcagccattgaaagaccggcgcacgaactgaagggttttcagcgcgtagccctgaaggcgggcgaatcaaaagagattactattagcattccgttggaacaactgtgccattgggatgaaaaaaaacacggatggacttttgaggagggcccagcaataattcgtgtgggcagttcatcagaaaacctgccgctgaacactgagattaacctgattaatgtgtataaaccgcaatga

SEQ ID NO: 479 - DNA, 2598 bp, Artificial Sequence
  6xHis UPI0008222B77
atgcatcatcatcaccatcacgaaaacctgtattttcaggggagcatgacggataagattaaaactatcctggaacagatgaccatcgaggaaaaagccgatatggtgtgtggagcctcaaacttctgtaccgccgacgcatcccgctatggcgttccggcgatccgcatgctggacggtggtacgggtattaactatgaacagcttattgccgacctgattcttagctggcgcaccaacccgcgtgatgaagaggaagcgtggctgatgaaagactttagcgccaccgaagaacggaacgtgatttttgattattttcgccctgacaaactgactgagaaagaaacgaaagtgtggaaaaaggttcgtgagtacttaaaagaacagttcatcaagaacaccaccaacaacgataccacactggcgtttgtggagatggccggtgatgcagctgcggacatcatgagcccggcctgcttaccatgcggtatgatgttgggcgcgacatttaaccctgacgtggtgaaccagactggacacgcactgggccgtgaagcccgtgcctatggagtatcaatgcttctgggaaccccgaatattaacattcatcgtgacccgctcggcgggcgtctgttcgagggatttagcgaagatccatgtttggtcgctaaactggcgccggaatatgtgaaaggtgtacaggcagaaggcgttgccgctaatattaagcatttcgcggcgaataaccaagaaaaaaatcgtcaaggaattaatgagacgatcagcgagcgtgccttgcaggagatttactttccaggcttccgcgcgtgcgtggaacaagcacagccggccaccgtgatggcggcatacaataagatcaacggcactgcgtgtaccgcgaacgaatggttactggatgggattcttcgtaaatattggggcttcgaaggcatggtggtctcggattggggtgccgtctatgaccctatcgcggcgcttaaagccggaaatgatctgaacatgccgggcatcactgctgatccggagaaggtagtgcaggcagttgaagcaggcgaacttaccgaagaggagctggaccgcaacgtagcacgtgttctcgaactgatggatacttatggatccccggaatgctacgatatgagcgcccagtacattatggatatgtcaaaacaggctgcatacaaagcggcgtgcgaaggtattgtgctgttgaaaaatgaaaacggtatctttccgatccgcagcaaagggaaagcagggaacgacagtgtctttgagaccgtatcagatgaggaggtcatgtcaggtgtggtgttatgtggtagcggcgcaatccgcttatatgattgtggcactggctccgcaggtattacgaccgacaaagatagctccatttatgaaggcttgatccagaatggcgtagaggtcagcattggaattcctgcagccggtaaacgcgctgggattagcacctacatttgtgtggcgcgcattcctggtatggaaggcaatgatcgcaaaaacatgaagctgagcgcggaggacgcccagatccttaaccagatgttagatttaaaacgtgaaaacccgctggttaaactgggcttaattctgaacgtttctggcccggtcaacttggccctgtgggaacacgagctggatggaattttttgcatgtttctacctggaatggagggtgggcacgcaatggcggatattctgatcgggcgtgtgaatcctagcggtaaactgccgctgacgtttccgaagaaatatcaagacaccccgacgtatctgaactttcctggcgacggctatcaggtcaattatggtgagggtatctatgtaggctaccgctattatgataaaaaaatggtggaacctctttacccgttcgggcatggcctctcttattcccattttgagatcagtaatgaacgtgcgataggagagcaaagcccggtagaaattatctacccagatggtaaagtcgataacaagaaaatgccggtgtttacggactctattaaaattgcggtagatgtaattaaccagggcccggaagaattctcagaggggatggaagtggttcagctgtacatttcggatccgtacgcgagcatttctaaaccggtgaaagaactgaaagcctttaagaaaattcgtctggcgtatggcgaacaggaaaaggtgagtttcacactcaaaaaagatgatttcgcgagctttgatagcgatctgcatcaatgggtggcggaggaaggcatttacaacatccttattgggaattcgtctcgcaacattgtttgcagcatgcctgtgtacctcgacgccaagacggaatattcttactctattgaaactcccatcaaggttctctatgagaactcggtgaccaaagcgcacatgaaccacctgtggcttcgtctgggtcttgatcctgcggatatcgacaacaaatacgagtatgaaccccacactcgcttgattgatctggtccatctgaaatgcgaaaatccagagcaggaagcactggatgagtttgggctccgtgtgggatcgttgaaacgtgcgtga

SEQ ID NO: 480 - DNA, 1803 bp, Artificial Sequence
  6xHis UPI0006C36823
atgcatcaccaccatcatcatgaaaacctgtacttccagggcagcatgacggaaattgatatgaaagggaacccgttctttttggacgaagagggagaaaactgggtgttagatacatggaaaaacatgtcgctggaacagaaatgcggtcaggtattctgtccaatggggtttaacggcgaggaggaaacactgaagcattttacccaggacattcaagtgggtggactaatgtatcgtgcagacagcgcggaaaatattcaagacatttaccgtaaattgcaggcgttttcaaatatcccgctgctactcgccgcgaatacggaagccggaggtgacggtttagcgtatgaaggcacctctttcggtaaaccgatggcggtggcagcaacggatgacccggagaacggctaccgcatgggttacacggcgtgcaaggaaggagcggcgctgggcttaaattggagttttgccccgatcgtggatattaattacgactttcacaacccaattaccaatgtgcgtacgtttggtagcgatccgaaaaaggtcctggactttgcgctggagtatatgaagggtgcagatgaatgcggcgtagctgtggctattaaacattttccaggcgatggagttgatgaacgtgatcagcacattcttaccagcgtaaactcatttagcaccgaaaaatgggatgaaacttatggctacgtctacggcaacctcattaaaaaaggcgccaagacagtcatggtgggccacattgcccagcccgcgtatgtcaaagccctgaacccgcaggccacgcgcgaggaaatgctgcgtccggcgtccctgtccaaagaattgttaactgggctcttgcgtggtaaactcggttttaatggcctcatttcaaccgatgccactcctatggtcggcttcaccgcagccatgaaacgatcagaagcgattgtccaggcaattaatgcaggctgcgatatgatcttgtttaacaaatcgttggaagaggactttggttacctgctggccggcgcaaaaacacgcaacctgtcaatggaccgtctggacgaggcagtgttgcgaattctggcgactaaggcatcactgggccttcacaaaaaaaaagccgagggcacgctcgtaccggagaaagaagctctggaaatcgtgggctgcgaaaaacacaagagctgggccaaaaaagttgccgaccaagcgatcaccctggtgcgtgatgagcaagaactgctcccgatctcgccgaagaagtataaaagagtgtatctgaacgttattcagaaggatctcgacccagagaacgcgtttgttcagtcttggaaagaaaagtttgaacaggaagggttccaagtaaccgttcgtgatcgtcgtgtgagcatctcgatggaagatttcgtgaatccagccggtatgactcctgagaagggcaagctgatgcatgaaatgtacaggtccgtagaagaaatgaagcaagattacgatctgtatgtgtacatctgcaatatggagaacgctagcaacaataccaccctgcgtctgaactggaacgtatgctttggcttaggagatgatgccccgtggtttgcgcctgaaatcccagcactgatgattagcacggcatacccgtttcacttattcgatgcacctatggttaaaacgtacattaatacctacagtggcaacccggaatttatacaggcagctatggataaaatcatgggccgctctgaatttaccggggtaagcccggcagatccgctgtgcggcaaaaattacatctga

SEQ ID NO: 481 - DNA, 1434 bp, Artificial Sequence
  6xHis UPI00092B3CD4
atgcatcatcatcaccatcatgaaaatttgtactttcaaggctcgatgtcgactactttcccggatggttttctttggggcgcagcaacctcagcttaccaaacagaaggttcactgacagcagatggtcgcggtcgctcggtatgggatgactttactgcgcgtcctggcgccgtggaaggtggaggtgacggctcaattgcctgcgatagttaccgccgttgggcagatgatgttcaactcgtagcggacttacatctgggtgcttaccgttttagcgttggctggagccgcgttcttccgacaggtcgtggtccagtggagcaacgcggtttggatcactatgagcgtttggttgacgctattctggaacgtggtgccaccccggtggtgactttgaatcactgggatatgccgtcagagctgatgcgcgacggcggatgggccggtcgttgtacagtggatgcgttcggcgaatatgcctcagccgtcgccgaccgtctggctgatcgcgttacctggtggattagccagaatgaaccgtggattgtgagccttctaggttaccagctcggtttacatgccccgggcgttgcagatttagacgccgctttcagggcagcgcaccatgtgctgctgggtcacggtcgtgcggccgatgtgcttcatgcggcaagcggccgggcccaagttggcgcggcacttagcctgtttccgtgcgacccggctacggatgcccctgaagaccgcgctgcggcctgggggtctgatggttatgtgaatcgatggtacctggatgcactgttaggccaggggtatcctgccgatatgcgtgcacattgggaacgcgcccttggtcatggtgttgacgacgtagttcgagaaggtgatgaaccagccattgccggccgtagcgattttgttggtgttaactactacacccgccgcgtggttgcggcagcaccagttggcccggatcgagcatttccctggcgtgttgtgactgccaccgatgacaatcctcgaagtgacgaaggatgggaaattgttcccgatgctctgcgtgacctgctggtgcgtattgagcgagaatacggtgttccgtcgatggtcacagaaaatggcggcgtttttggcgatggtccgacacatgacggccgtgtacatgatgtacgtagaaccgaactgttactcggccatctacgcgcggttcaccatgccatcggtgctggggcccgtgttctgggctatttgcattggagtttactggataacttcgaatgggctttggggtatcgcccgcgtttcggattagtgcatgtggattatccgactggtcgccgcaccgtgaaagactcaggtttgctgtatgcggaaatcgcacgcactggcaccttaccggatcgcttacccgctattaccccgttcggttga

SEQ ID NO: 482 - DNA, 1971 bp, Artificial Sequence
  6xHis UPI0009C85428
atgcaccaccatcatcatcatgaaaatctgtatttccagggtagcatgtgggttgtaatgagctcgtacaacagtatcaatggggtcacagcgtccgagaatgacttgttggaaaccccgctgaacagcgagtggggttttgacggtgttgttattagcgattggacagctgttcgcagcgttgctgcggcttcggctagccaagacttagcaatgcctggaccggacggggcgtggggtgcagcactggttgaagcagtgcgtgatggccgcgttagcgaggcggcgattgaccgtaaagtcgctcgtcttttaacattagcgcaacgcgtcggcgcgcttgaaagctacgctggtggtccggcagacgcgggaggtctgttgcgtgtggaagatggcgtcgcctttgcgagagaagctgcagcagaagggaccgtactgctggccaacgatggtgtgttaccgcttgatgtggcacgcctccgccgtgtggcagttatcggtcagaatgcggttggcgcccgcactcagggcggtggatcagcgacagttattccggaacgggttgtgtccccttgggaaggcatagttgccgccttaccggatgccgaagtaacataccgtttaggagcggtggcggcaatgggcattaccgctctgccgctcgccgaactcaccaacccatcaacgggtggcccgggtttactagtgcgtttcttagatgacgccggggtagagctaatgcgcgaagatcgctttgccaccagcttagttttcttcgcgggtaacgcccctactctgaccgcgtcagttttagaacttagttgtcagtggacacctaccgaaaatggcgatgtaacggtgggattcgcgagcattgggcgcggccgaatcagtgttgatggcgcacttgttctggatgacgtagccgtaggcgattcaacagatgtcggcgcaaatattctggatccgccgaaagcagtagcacccgtggccgtcagcgtgactgcgggccgcccggttgatgtagttctggaactcgatctggctatcatgcaagaaaccacggatggtgcgttcggtattaccctgggtgtagcgccgtctgacacggacccggaagctcgtattgcggatgcagtggcagtcgcggcagccagtgacgtcgcaattgtcgtagtgggcacgaacgcgcaggtagaaagcgaaggctttgatcgtagcgatctccgcctcccgggtcgccaagatgacttggttgcagcagtcgcagccacgggcactccaacagttgttgtggttaacagtggttctcctgtggaacttccttggcgcgatgacgtatcggcgatcgtcctgccatattttggcggccaagaaatgggcaacgcattagcggatgtgttactgggccgtgtagaaccaggcggtcgtctgcccaccacctgggccgcaagtatggcagaagtaccagttcttgatgtaacccccgtggatggtaaactggaatatgcggagggaattcatttagggtaccgtgcttggttacgtgccggtctgggcgatgaaccgcgcgaagtgccgcgcgctgcatatccctttggctttggcttgggctacactacctgggaattacgtgatctggttgtcgaagaagttgccgcatcgggcggtgatgtgcgcgtaggtgtgacggttacaaacactggggctcgccgcggcaagcaggtggttcaagtgtatctggcacgtcccgaatcttcggtggatcgccccgttcgttggttagcgggccatgccgtggtgcgtgcagatgcgggcgagtcagtcgccgttgagataagcgtgccggcccgcgcgtttgcgcattggcagaacggagtcggctgggcccatgaacctggcacttttgacgtactggtgggtaccagtgtagatgatgtcccgctgtctagtacagtgaccctgtga

SEQ ID NO: 483 - DNA, 1830 bp, Artificial Sequence
  6xHis UPI0009CA1D5C
atgcaccaccaccatcatcacgaaaatctgtatttccaggggagtatgcaagaccctagccgcccggtccttgcaactttaaagcatttcgtggggcacagcttctccgagggtgcacgtaatcacgccccggttcgtattgggccgaatgagctacaggacactttccttctgccttttgagatggcagtaaaattggctaaggcgcatagtctgatgccggcttatcacgatcttgatggcgaaccgatgcatcagtcggtacgttatcttcaggagatcctgcgcgatcagtggggtttcgatggtattattgtgagtgactatgaaggcattagccagctgttttgggaacatcgaacacagccggatatggcctcagcagccgcagcagcattaaccgccggcgttgatgtggaactgccgggtgacactgcgtaccgcgaaggcctgaaacaagcgctggaccgcggtattctggacatggccgtcgtagatcagtcagtctaccgccacctgttgtggaaatcccggttgggtttatttgaaaacccttacgtagacgaagacagcatcctgcctgacctggggaagcatgatgagcttgcgtataaagctgcggtccgctcgatcgttctgctgaaaaatgacggaattctgccgttagcggatgcgggtaaggtcgcgctggttggccctttggccgacaacgcatacggcatgctgggtggttattcattcccggtgcatttggtgttgtcagaacgtaaagaacgcgatactgctcttcggactctccgcaacgaactgtctgatcgctttggtgagaatctggtgtatcgtaaaggttgcgatattttatcgggccgcccagagaaacccgccgtttttcctggcgacgtagcccaggatggtagctcgcagacctcatatatcagtaccgacgaaagcggctttgcagaagcactggacgctgcgcgcaatgcagatacggtgattatggcagtgggcgacttggcgggtctatttctgagcggaaccgttggtgaagggagtgacgccagtagcctggaattaccgggggctcagcgacgattagccgaggcggtgttagatttaggcaagccgaccattgtgatcatgtttagtggacgtccgtacaacagcgggaccatctttgaacgcgcaaatgcagtaattcaggcttggctgcctggacagcgcggtgccggcgctctggccgatattatgaccggcactgtaaacccagaaggccgcctgtcagtgtcaattcctcatgtggcaggtgcgatgccgtatttctataaccataaacgcaaaagcccgggcacgccgattcaacaagaattcggagcagcgtatccgttcggcttcggtctgtcatataccaccttcagcatggactcatttgcggtggaagaaaaaagtatccctattgatggggatattcgtgttagcttaaccgtagcaaacaccggcaagcgcgagggcgatgagttagttcaagtctacattcgcgataactactcgcagctggttcgaccggtgatggaactgaaagcattccaacgtgttacactgaaaagtggccagaaagcaaaattgagctttcgcatccctagtgacatgctccagtataccggccgcgacggaaaacgcatggttgaaggcggaaccttcgatatcatgattggcaactcgagccgtaatattctgtttaaagagaccgttatggtcgaaggcaacgttaggtacctggaatcagattggaagatgttaagtacctgcgcagtttcgtacctcaactga

SEQ ID NO: 484 - DNA, 2451 bp, Artificial Sequence
  6xHis UPI0009C7041F
atgcatcatcatcaccatcacgagaacctctacttccaaggatctatggtgaacgaagagctgaaaactctcttacacacgctctctttgactacgaaactcaagctcctgactggagcgaatttctgggagagtgagaaagtccttggcactgatctcccaattattgttatgaacgacggtcctttcggcgtgcgcaaacctacggtgaacgttgacagcggcatgctgatggaagtaatccctgcaactgcgtttccaactacgagtgcgttggcgtcttcctttgaccccgagttgctggagaagatgggaaagactttagccacggagtgtatcgatcaaggagtggacctgctcttgggcccaggaattaacatcaagcgcagtccactttgtggccgtaatttcgagtactttagtgaggacccctatttaacgtctgaaatggcctcaggtttggttcgcggccttcaaagtaagggcgtgggcgcgactcttaagcattatgccgtcaacaatcaggagaaagagcgttacacgacgaacgcaatcgtagacaagcgcgcgctgaacgagatctatctgcgcccatttcacaacgttatcaagaacaccgaaccctttagcgttatgtgttcttataatcaaattaacggtcgtcatgcaagccgccactataagcttttgacagagaaattgcgcaatgaggcgaatttcaagggtttagtcgtaagtgactggggcgctgtagttgaccatgtggattccatcaacgccggcctgaatctcgagatgccaggtggttaccaaaatacggctgagttagagaaggctgtgaaagacggtgaaatcaagctggagactatcgacgagatgattacgcccctgctgaagttcatgatgtacaagcgtgacaatcctaagccgaaagtgaagtgtgattataagaagaatctggaagtcgcgcaagagattgccgagaagagtgccgtcctcttacgtaacgaagataaccttctgcccatcaacaagactgcaaaagtcggactcattggaaatttcgccattaagccacgctatcagggatcgggtagctcccagattaatccgcatacactggtatccgtgcacgacgcttttattcagaatgatgtaaacttcgtatatgctgacggttatgcagagcacgaggttaagccgaataagaagaagatcgccgaggcggttaaggtcgcgaagaacagcgacgtggttgtgctctgtgtgggtcttccggaaagctacgaggttgagggttacgatcgtaagacactcgacatgcccccgtcacataatgagctgatcaaagaagtggccaaagtaaacgaaaacattgttattgttttaagcacaggcagtccagttacgatgccatggatcaacgacgtgaagtctatcttactcacccacttggctggcagcatgaccggccccgctacgtataacctgttattcggggtgaccaaccccagtggcaagctgtcggagacgtaccctttgtctctggacaaaggtctgcctggcggagagtttctgacaagcgatcaaaatgtgctgtaccgtgagtcactctatgtaggttatcgttactacgataccttccgtgagcaagtcctgtttcccttcggccacggactgtcatatacacaattcaatacttcgcatcatgagatcgaagaggttaaggacgggtataatatcacaatggaagtgacaaatatcggtcatattcgcggcgccgaggtgatcggtatctacactggtaagtcgcgcagcctcttatatggcccgcgcaaagagcttcgcgcgttcaagaaggtatacttggaccccggggagaagcaaaagattaatattttccttcctacggaaagcttaaaggcttattgcccggtgaagcaagagtgggttctcgagaatgtgaattataacgtctacgtcggcatcaacgtgcaaacaaccgacgaaattttccaaattttagtcgacgacgccaacgatcttagctacctgaagaattatcaaaaggagaatgaaatgtactatcgtcgcgcagattttaacccgtccatcaaggatttcacgaccctgttcggcggggaatccttaccgttgttcttcgcaaaccgcaagcgtccgtttacattagcaaataacatcagcgatacgaccgattactggtggggacgcacgatctataagatcatggcgaagacctcacgcaaattagcaggagacgacgtggtattgcaagagatggcggttgagactatcaaggagttacccttccgctctctgagtgccctgtccagcggagaagtatcaacgaatcaacgtgatgcgatcttgcttttagtaaatggtaagcctattcgcggtatctttaaatttctgcgtaagaagaagtaa

SEQ ID NO: 485 - DNA, 2265 bp, Artificial Sequence
  6xHis UPI0004E2A41F
atgcaccatcatcatcatcacgagaacctgtatttccaaggctcgatgcttataaagaaaagcattctgtttcaaattaccaagaagataaagatgaagaaggtaattattaccgtatttagcctgctgctggttggctatttacatggccagaaaaaagtgtcaaaccctagttatgaaaaagccgtaaatgaacttctggcgaaaatgaccctggcagaaaaagtgcatattttgcacggtgatcatttatactctttcccgggggtcgaacgtctgggtattccgccctttttcccaagcgatggcccatgttcagttcgtcctgaactgtccgacggaggcgattacgtaaacaccaacaacaaaaaggattgcgcgacggcgtttccaacgctttcggctttggcagcaacctgggatgtgaacatgtgctacctgttcggcaatgcgctgagttcggaaaaccgcgctcgcggaaaagatatggtattagggccgggtgtcaacataatgaggaccccgttaaatggccgcacttttgaatatatgggcgaggatccgtttctgacctcaaaattgtgtgtaccggtgatcaaggggattcagagcaacgacattggtgcctgtgtcaagcatttcgcgatgaataatcaggagctcaaccgacagtcggtcaacgcaaaggttgacgaacgcaccatgcgcgaaatctacctgcccagtttcgaagcagcggttaagcagggagattcatggagcatcatgggggcgtacaataaagtgaacggggattggtcgtgcgaaaacccgtttttactgcaaacgattctgcgtgacgagtggggtttcaagggactggtagtgtccgattggggcgctattcatgatatgaaacgtgcggcactggccggctgcgatatagagacagatcgcggcccgtactataagaacttagagaaggcggttattaacaaggagctgagcgaagaggtggtagatgtcaaagttcgccgcttacttacgtatttttttaaaactaaaaagttgggtcccgacgccggcaatcgcaagtctggcagcattaacaccgaagaacacaagatggttgccaaaaaaatcgccgcggagagtattgtgctgctgaagaactcagaaaacatcctgccgcttgataaaaactcactgaaaaagatcctggttatcggacgtaacgcagaccttaaactgtgcgtaggcattcagactagcggctattgtaatttagacttagccggcggtagcggcgaggccaaaccactgtatgaaatcaccgccctggacggcctcaaaaatgtgctgggcaccaacacagaaattaaatatatcaactccaaggaatatagctttgaaaaggctctgtcatcagcctcgaaaaacttttataatccgggttttgtgaaaatggtacaaagcatggacgcggtgctcatttttacaggcaattctcacgctgaagagcaggaaggcgccgatcgtcttacactgaacttaccggccggccaagacgaaatggttaatgcgcttgcgggcatcaatcccaaaaccattgtgattaaccagtcaggcgcgccggtcgctatgccgtggattgaaaaaaccaataccgtggttcagtactggttctccggtcaggaaggtggcaacgcattagccgaggttctgtttggcaccgttaacccgtcgggaaaactgccgtgcacctttccgcagaaactggaagatgtggcgtgccacgctaacaaatcatacgtcgacaacgaagaaaattactcagaaggcgttctggtaggataccgctggtttgataccaaaaatatccaaccgctgtttccctttggccacggcctgagttacactcaattcgagtacggtaaactggagatgaaaaaagaaatgaaatcgaacgaagtgtttgtcgttaaaatcccggtcactaacgtcggtaaacgtgagggtgccgaagtggtccaattatacattcatgaaaagaatcccgtccttttacgcccggaacaggaactgaaaggatttagcaaggtcactctcaagccgggagaaaccaaaatggttgagattcagctgtcagcccgcgatttcagctactggagtgtcgaacagaaggggtggaaggcatcggaaggcaatttcgaacttcgcgtgggctcaagtagccgtgatattcgtgctaagggtgaggtccgcttcattagtagcaagaaatga

SEQ ID NO: 486 - DNA, 2574 bp, Artificial Sequence
  6xHis UPI0005102470
atgcaccatcatcatcaccacgaaaacttgtactttcagggtagtatgcccgtgctgggattctctcagaccaaatatacttttcagaaccaagacctcccgattgagacccgtgtgcaggatctgctagaacgcctgaccgtcgaggaaaaagtcagtatgttggtttcaacagcagaagcgattcctcgcctggaggtggaaaagtattatcatggaaacgaggcactgcatggcgtcgttaaaggcggtcgttttaccgtgtttccgcaggcagtggcgctggcggccacgtggaacccggatctcatttataaagtttcgagcgcgatttcagacgaggcgcgcgcgaagtggaacttctataatcaaggcaaggatcagaaaaatgtatattccgatctactgactttctggtcacccacgataaatatggcccgcgacccccgttggggaggccgaacgccggagacgtacggtgaggacccatacttgacgagtaaaataggtgttgcttttgttaaaggactccaaggaaacgatgaaaactacctcaaagtcgtgtctaccccaaaacatttcgtggccaacaatcaggaagataaccgctttgcctacaatgccaatatttcggatcgcagcctgcgcgaatattacttcccggcatacaaagcgacggtacaggagggcaacgcgcaatcaataatgagtgcgtacaacgcgattaacggtgttccttcgacagccaactcttggctgctgaacacggtgctgcgagatgagtgggggggcttcaaaggatacgtcgtatcagactgcggagcccctacctatattgtgaaaagccacaagtacgtcgatactaaggaattaggtgcaaaagcagcccttgaagcgggcctggatttagaatgcggtaatgacatctacgcgaaatacctgctgtcagcgtataaaaaaggcctggtgagcgaagagcacattgataaagcgaccgcccgcgttttaaccgcccgatttaaactgggtatttttgacagcacagagaacaacccgtataccaagattagccccgatgtgattggaagcaaaaaacatcaggatttagcactggaggcgagtcgcgaatcaatggtattactgaaaaacgaaaataacatcctgccgctggacgtgaacgctatcaaaaaaatcgcggtggtggggttcaacgcaaatcaagtcgtttttggggattattccggtttacccgtcattaaaccgattagcccactggaaggcattatggaaaaggtaggtaataaggccgaagttacttatgtgaaatggaaaaccgccgcgcgtaacctgaatctgatcgaagcagaaaatctgcgcaacgatcacaatgatgaaacgggcctgtttggcgaatactacgatgacaaattcctagagggtacaccacagacgcgggtcgataaagtggtaaacttcgatccagtcaacaatccgccggacccctataccaattaccgtcacaaatcgattcgttggaccggatatatcacccccaatttctctggcacctataaaattggtgtgaacagcgacgacggtgtgcgcctctggctaaacaacaaactggtggttgatgaatggcataatcgaggtatgaccaccgatcaggtcgaaatcccgatggaggccggggaaaaatatgttattaaactagagtactttgataacggcggtgatgcaatctgccagctgctgtgggaggtacctacattgacggatgatctttatgccgaagacaaggcggtggctcgtgcgagcgactatgtaattgccgtgatgggcattaataagagcatagagaaagagggccgcgatcgcactgatctgaagctgccggaggatcaggttaactacttaaaagaaatctacgccgaaaacaagaatatcatcgtcgtgctggtggccggttctagtctggccatcaactggatggataacaacattccggccattgttgatgcgtggtacccgggcgaatctggcggaaaggcgattgcggatgttctctttggcgattataacccggccggtcgtctgccgtttaccttctataaaagcatcacagatctgcctccgatggacgattacgaagtgagcaacggccgcacctatatgtacttcgaaggcgaagcgctgtatccgtttggctatgggcttagctattcagagtttgaatataagggtatgaaaatcaagcagaagggagatatgctgacaattacaaccaccatcgaaaacattgggaactacgacggagatgaagtggcccaattatacttcaaggccccaaatgcttcaattaaacgcccgttaaaaaagctggtaggcttcaagcgtgaatttctcccgaaaggcaaatcgacacaaattgaattcgaagtgtctaaaaaagagttacagttctgggatgtaaagactaaacagtgggccttcgcatcaggtgaatatcagtttatgatcggcggctcttcccaggatattaagcagcaaaagtcatttcgcctcaagccctga

SEQ ID NO: 487 - DNA, 1938 bp, Artificial Sequence
  6xHis UPI0005B0F0AE
atgcatcatcaccaccaccatgaaaatctgtattttcaggggtctatgccgccgagtgacttcaagaacgcagatgttgatggaattgtggagaaactgacgacggacgaagccattttacttacggccggtgtgggattttggcgcactcacgaagttccaaggctcggtattcctgctattaaggtgcgtaccgattcggaaacgttgctcattcgtattactgattttaagaacgcggacgtggacgatatcattgaaaaactgactaccgatgaagccatcctgctgaccgcgggcgtgggtttttggcatacccatgaagtaccgcgtttggggatacctgcgattaaagtgtgcgacggtcctaacggcattcgggggaaccattttttcatgtcaaccccggctaaatgtctacctagtgcgaccgcactgggagccacatgggatacagaactgatcgaagaagttggcctgaagctgcttgcgggcgaagctaaactacgtgcggcaccagtaattcttgcgccgacatgcaacattcagcgtaatccgttaggtggtcgtgccttcgaatcctttagcgaagatccgctgctttctggcatgattgcggccgcgtatgtcaaaggcgtgcaaaagggcggcatcggcagcacaattaaacattttgtgtgtaatgataaagagaatgaccgcatggcgtatgatagcatcctgagtgagcgcgcgttgcgcgaaatttacctgatgccttttatgctagcgcagaaatacgctaagccgtgggcgttcatgacggcctacaaccgcgttaacggtactcatgcgagcgagaatcgtcatctgttgcaggacatactgcgcaatgaatggaaattcgatggtcttattatgagcgattggtttggtgtgtacagcattgatctgagtatcaacgcgggcttagatctggagatgccgggaaccaacaaatggcgcatgctggacctgatgaaccgctctattacttcacggaaactcacggttcggacggttaaggaacgcgctcgtaaagtcgttgagctggcgaaacgtgtggcacaagaagccccggaaatggcggaggcagtaaaactcgcctctgaagcggatgtcgttattgctgtagtgggtctgaacgccgactgggaaaccggcgggtatgaccgaaaaacattagcgttaccgggccgtaccgacgaattaatcactaaagttctggccgccaatccaaaaacgatcgtggtcacccagtcaggtagttccattactttaccttgggctgattcggtcccggccattgtacatagctggtacctaggcaattctaccggtgcggcaattgcggatgtactgctgggtaacaaaaatccgtcgggcaaactgtcattaacctttccaaaacgcctggaagatatctcaggtcacgggcactttcatagcgaaaacggcgtggggtacaaacacttccagcaccgtggtattgcgccgcaatttgcgtttggccacggccttagttacaccacatttgcttacagcgacttacagttgtcgaccccggttgttgccaacggcgacttttcactgtcggccacggtcacagttacaaataccggcaaagttgctggctctgaagtggttcagttatacgtcagtatgcctaaaacctccgatctgacgcacccggaacttatgctgcgtgcgtttcataaagttaaagatctcgcctcgggcgcatcgcagaaggtgaccattacagtggataaatacgcagtctcgtattgggaggatcgcatcacccgctgggtcattgagaagggagagtacggcgtcaaggttggctcatcttcggactccctgccgctcagcagtactttcgtggtgagtaaaggcttagaatggaacggcctttga

SEQ ID NO: 488 - DNA, 2439 bp, Artificial Sequence
  6xHis UPI00065C2666
atgcatcatcatcatcaccacgaaaatctgtactttcagggttcgatggatgtcagagatgagacggctcatgcccccgccctgacgttagatgaaaaaattgccctgggcgcaggcgccacattttggactacccatgcggccccgggaattcgtgctctaacactgaccgatggtcctagcggtttgcgcgatccgggtgaactaggcgaccatctgggtatagcccgttctcgtccggcaacatgctttcctgcagccggtaccctagccgcaagttgggatgtcgatcttgtagccgaagtgggcgcggcgattggtacagaagcaatagaccagaatgtggatgttgtcttgggacccggggtaaacatgaaacgtaatcctttgtgtggccgcaattttgagtactatagcgaagatccgttgctgtcaggtaaactcgcagctgcctggattcgtggcgtccagtcaaccggcacgggcacgagtctcaaacatttcgcgctgaataatcaggaaaccaagcgcatgacgattgacgtgcgcgtagatgatcgtgcgttacatgaatactatctcccagccttcgaaattgccgtgcgtgaaggcgatccgacgaccgttatgaccgcctacaatcgtgttgagggagtgtattgttcggagaaccgtcgtctggtaacagagatcttgcgtgagcgttggggtttcgagggagtagtagtgacagattggggcgccatgaacgatcgtgtcgccgcttatgctgcgggagttgatctcgaaatgccagggaatggaggcgcttccgatgccccggtccgtgcagcggtagcggcgggacgtctccctgagtcaattttagatgcctctgttgaacgtcttcgcgtattggcgacgaggactgcggatcgcgtacgtcatccgagcccggatttgtacgatcgcaatcatgcgttagcacaccgtgcggccacggaaagcggagttctcctgaaaaatgataatgcactgcttcctcttaggccgggcaccccggtggcattgataggcgcgctagcggagcagccgcggtatcagggcactggtagcagccacgtgcaaccgacccgtcttgttggcttacgcgccggcgtagcggactatactgaagtcacctatgcggcaggataccgcatcgcggatgaaccggataatggcctgctggcggaagccgtagccctggccgaaactgcccctaccgtaattgtgtgcgtggggcttactgaaatttacgaaagcgagggctttgaccgggaacacatgcgcattccgaccaaccaaatagcactgctggaagccctagcgcacctggcagatcgtatagtgttagtggtcgttggtggttcggcaatggaaatgccgtgggaaagctcagcctccgcgatcttacacatgcagctggctggtcaggctggcgggtcggcagcggcagcattactgttcggcgctgccaacccatcaggcaaattgaccgagtcatatccgtttcattaccgtgacgtggtgaacagtggtacgtttgggaccgaccctgcccaggccgtgtacctggaatccatgtactgtggctatcgttattttgatagcgcggagcacccggttcgctacccgtttggttttggactgagttacacttcgtttgactacagcgatctgcgcgtgacggcccacggtgaacatactttcgatgtacgtgtgaccgtcaccaacaccggagaccgtgatggagcggaagttgtacagttatatttagcccctcgcacgggtggtgttcaccgcccagcccaagaacttcgagcgtttactaaaatccgactggcggcgggtgagagccaggaagcgacccttcgtctcgaccagcgtagttttgcgcattttgatccagccgtgcaagattgggttgtggaagccggcacctatgaagtccgtgtggcggcatcgtcgcgtgatgttcgtctgacgacccgcttggatgtgactggtgcagaaccgagaagggttccggtgtcggattggtatcaccgtccgtcaggagccccaactcctgcagatttcgcaaccgtgcacgcgccatttccacgtctgttggcacctcgacgcggcacatttgaccttgatagcaccattctggatatgaaagattcgagtctagcctgtcgcattctgtatcgatttgtagagcgcgcggtggcgcagcgtgctggtctgcccatcgattacggcaatgttcgctttaaaatgttaatctactcaagcgcggatctcccgattcgtacgatggcacgcatgagtgccggtatgatgagtccgcgtttagcgcgattttttgtcgatagtgccaatggccgtacagttcgcggcttgtggagtttgttacgaggcggacctgcgtga

SEQ ID NO: 489 - DNA, 2361 bp, Artificial Sequence
  6xHis UPI000760375B
atgcaccaccaccatcatcacgagaatctctatttccaaggttcaatgaatgcccgtaccctgtttatcggctgtttaactggcctgctcctgccgctgtcaacgttcggccagggcgcagaggaagcgcgtgagttgctcatgcagatgacgcttcgcgagaaagcagaaatggtcattggccacctcagcgccatgcaaaaagtcaacccgatgaacccggatgcattacgtgaacttgactttacctaccctggtctggggatgcccatcgggggatgtccgcgcctgggcctgccggtaactatttgcagcgacggaagctatggcctgaagcgctacatgccgatggccgatggcaagtactacaccacagtttttccgagcccatttagcaacgcctcaacctggaacacacacttactccagcaactttcagcggcctatgctcgcgagggccgcgaagccggtgtgcaggtactactgggcccgggtatgaatatcatgcgcgatcctctctgcgggcgcaattttgaatactactcagaagacccactgctaaccggctcgatgggcgcagctgtcgttagtggtatccaaagccagggattagccgctaccccgaagcactttgcggcgaatagccaggaaacggatcgcgtggtgaatgatagccgggtatcagaacgtgcgctgcgcgaaatttatttaaaaggctttgaacggatgattcaacaggccgcaccggtctttgtgatgacctcctataacaaaattaacggacgctacacaagtgaggatcgtcacctgttgcaggatatcgttagaggagaatggggcttcaaagggtgcttcatgaccgattttggcggtttgggctggagtccggatcagattgcggcaggtaatgatctggttatgccgggctcgagctaccatgtacagaatattgtacacgccgtcgaaactggtcagctgagccaggcggatctggacgcttgtgtgagccgcttgatccgtgccaatcaatggattgcacagaaacagacccgtgtcccgggtggtcaacagacggaaagtgatcgtcagcgtttggcccgtgaagcggctaccgaaggctttgtcctgctgaaaaacgatcagatgcttcccatggatagcaaagacgaagtagcattctttggcattggctcttattacacggccattagcggcatcggtagcggtcggattaatgccgattaccgtgttaatattgcggatggtatggccagccagcagtgtgcggcggtggccaagttttatcagtctcgattgaaagcttttcgtgattctctgcctccaccgtcgggcctggcagcaattatgggcagcgatgatccggtagttccagagtggctcccgagtgtcgaactaatagagcaatcagcccgagaaactacggcggcggtcgttacgattaagcgctgtgccggcgaagggtacgatcggaaagcagttgaaggggattggctgctcacgcaggaagaacgctggctgctgaaccgtgttgcacaagcgtttcactcgcagggcaaaaaaatgacagtgattctgaacgttgcaggcttggtggagatggcctcctggcgcgatagagcggatgccattatgcttgtttggctaccgggccaagaaggtggcaacgcagtagctgatgtgttaaccggaaggatttcgccatcgggccgtctcacagccaccctaccattacgctacgaagatgttccgagttatggtcattttcccacgggcgtggaaaaaagtatcgatgtcaccgaaaacgggtttcaggtcgagaatgtccagaatcccgtggtcgcggtgttcgaaaacggtaaaaaacgcaggcatgataaaccggactcgctccaggtggagaaccttgattatacctgcttcacagaggatgtattcgttggctatcgtcactacgacacccagcaaagcgatgtggcctatccctttgggtacggcttatcgtatacgaccttcgcgtatgatgtggaaggcctggtcgccgatcacaccgttagcgtgactgtcaccaatacgggtcgtttcgcgggtaaagaagtggtgcagctgtatatggtgccgccatcagaaagcattaaacgtccggcgcatgagctggttgcgttcgctaagacccatttgctccaaccgggggaaagcgaaaccctgcatctacagtacgacagtagagacttgtgctattacgacgaaagccgtggggagtgggtgaaagaagatggcttacaccgtttgcaggtggcccagagctcgcgtgatgtgattaagacgattgacattccgtga

SEQ ID NO: 490 - DNA, 2622 bp, Artificial Sequence
  6xHis UPI0007DF4250
atgcatcaccatcatcaccacgaaaacctctactttcaaggaagcatgggtgatgcgggacagcgtctggaaagcatcctgcaacacctgaccttacctgaaaccataagtctgttaagcggcaaggatgcgtggcatactgcgtcaattcctcatcagggtatcccttcgattcgcgttagcattgtggtgctgatcgataaccaggttccgttcgcagaaggcctagtgccgattaactcatttcagatggttcctgcagaacgccgcaccttccaagcaacgtccactacctgctttccttgcccgattgccctggccgccacctgggatgtgaatttagtaaaagaaattgggacccaaatggcaggccaagccaaggcccagggcgtgcacgtgattttgacccccaccattaacatccagcgatcccccctgggcgggcgtaacttcgagagcttctctgaagatccggttctgtcgggtacccttgcaagtagcctggtcaacggcattcagcatgaaggaattgcggcgaccgtaaagcattttgtgtgcaacgaccaggaaacgaaccgcaccaaaattgacgtgattgtagaagaacgcgcactgcgtgaaatttatctgaagccattccagattgttatccgtaacgcccagccttggagcattatggcctcttataatcgcgtgaatggtctgcatgtgtcagaacatccccgtttactgaatcagatcctgaggaaggagtgggattgggatggcacaatcatgagcgattggtttgcgacatatagcacttcagaggcgctgaaagcgggcctggacctggaaatgccaggcaaaaccgaatggcgcggcaaactggttctgcgtctgctccatgccggcaaaatagagccgccggtactattggagcgtgcgcgaaacgtgctgaatttggtcgagaaaacccgcgcaagcggtgtcccggaggatgcggaggaacgagagcataatacccccgaggtgcgggaggccaatcgcaaggcagcgacggagtcagttgttttactgaagaatgcgacccagctgctgccgctgaagacccccggccgagtggcagtgatcggacccaacgcaaccgaagatctatattgcgggggcgggtcgagcatggtgttcccgtattattacgtatcggcctatgatggcattaaacaagcgctggcggaacatagcccgtctagcgagctggcttttgcgcagggttgctacaagcataccctgcttccgctgttaattaccgaaagcgcgccaggccagaaaggtctggatctggagttctatgatcgcgattttacccaagagccggatgctcagaaagtcgccgaaacccatagtttaacctggcgccttgtctttctaggtagcttgcctaaagcggcgctgccagttgtatacggacgtctgcgtggtacttacacggcaccggtagacggcgatttcgagttcggcgtagttaccaccggtaaggcgaaaatctacattgacggcgaactgctggttgacaattggactaaacaggagcgcggcccgtttctttttggattaggcaccaaagaagtacgcggagtaaaaaagatgacggcgggacgtcagtacgaaattctcacagaatatagtaatcgcagttcgttgccggatcggactggaaccgatcttggtggtggtattttgcgcgtaggcgtgtgtcgaattgtttcgcccgagaacctgctaaatgatgctcttgaggcggctgcccttgcagataccgtgatttgcgtagttggtacggatcaggaacacgaaagtgaaggttgggatcgcaaagatatgaaactaccgggcacacaagaccagttggtggaagctgtgctaaaaggcaatccccgcactgtgatcgtcaatatttcgggcagccctgttgaaatgccctggattgacgaagcaagcactgttgtgcatggctggttcatggggtcagaattggggaacgcgctggcagatgtgttatttggcaaagtttctccgagcggtaaactgccaatcaccttcccacgtcgtttggaacaaaacccttcgtacgggaattttccgggcgagaacggcagagtgcgctatgctgagggaattctagtgggctaccgccattacagcacccgtcatgtaccgagcttatttccgtttggtcacggattaagcttcaccgaattccagtacagcgaactgttgctgaacggggacaataccttggagcctgaaggcgcggtgagcgtgtcgttcaccctgaaaaacaccgggtcatacgccggccatgagactgtccaattatacgtgtccgccttgaatagcagcgttttccgcccactgctggaactgcagggctttcaaaagatccgcgatgtgcagccgggcgaatcacgcaaagtgacctttacaatcgacaaatatgcggttgcatgctatgacgaagaaagcgagaaatggatggccgaagcagggaaataccgtgtctccgtgggtgcctccgtggaagatttaagactggcgaccttcattcaggtgccgacgacctttcgctggtccgggttatga

SEQ ID NO: 491 - DNA, 2553 bp, Artificial Sequence
  6xHis UPI0008209852
atgcatcatcaccaccatcatgaaaacctgtacttccagggtagcatgaaaattgttgagaaacgttggtacgcgtgctttctgctgctgattgtcgccgtgtgtatgcaagcgcaggaccgggaaaaaaaaattgaggcgctgttaagcacccttaccgtggaagagaaagtctcactgtgctcagggggtttcagttgtttcaaaggtatcccgcgactgaacattccggatgtcgggtggtgcgacggtccgcggggtccgaatggtcgcgcgggcgctacagcgttcccgtcaggcattttgttcggggcgacttggaatccggaaatcgtggaacgtgcaggtaatgtgatgggtgaagaactgcgcgccatgaaacgatctatcctactgggcccggcgtgcaatatcctgagggatccgttatgcggccgtttctttgaatattacacagaagatccttgccttaactctgcacttacggttgcgcaggtgaaaggcatccagtcacaaggtgtggcggcgtgtctaaagcactacgcctgcaacaatagggaaaacaaccgcaactactacatgagcgttattgacgaccgcaccatgcatgaaatttacctcccggcattcaaggcagccgttgaggaagcagacgtacaaaccgtaatgaccagcgcgaacggaatgaattatgagtttgtgagcgattctcgtaaaatgcagaccgatattctgaaaaaccgctggggctttcaagggtttattatgaccgactggctgcagacccgaagcacggaaaaagcagcgtttgccggtctggatgttagcatgccaggaggcgatgcctgtggcttcggaaaagccttacttgatgcagtaaaagcgggtcgcgtatcgatggatgtgattgacgataaagtgcgtcgcattctgcgcgtctacgactacatcggcatcttagaacgtgaagatcgcagtgcgggtgccaccattagtactccagaacatcaccggacggcactggaagtcgcggaacagggaatcgtgttactgaaaaacgagaaaaatgccctgccgatgaacgcacagaaactcaaaaacgtgctggtgatcggccctaatgcggataaacgcttttgcttaggcggtatggggggtagcagctggatggaatccacttacgaagttacagttctgcagggtattaaacgtctgttaggtgaaaacaaagtgagctatataagctcagacgagctgggcgattttcgccctctgagcgcagaaatgtcccctgatggcgccgggttcacggcgcaatactttgtacaaggcaatgaacagccagtgctgacccgtaccgaacagtcagtagactttatgtgggaaatgaaaagcccggatgcgtccattccggcagataagttttgcgaagctcggtttgagatgaaattcgttccgccggtggatggtaaatataccttcagatttaccgcgggaggcggcatcgcgtatgtctttaacaatgaatgggccggtgcacctgtcaccattgcgcaccctggcaaaggtgagggaactgtctctgcctcgctggacctgaaaaaaggtgtcatgctgcggctatgtctcatctatcagaaggataagggtgatgcggcagttcgtgtggaatggcagtcgcctcaaaccaaactcgcagcgcgtcagtggaaacaaattgaacacgcagcacgcaaagcggatgcggttgtatttgttggtggtattgaccatagcttggacacggagggtcgcgatcgtctgtccttaaccttcccgcagttgcaggagacgctgatcaaccgcctggcgaaactgaacaaacacacgcacgtggtccttattaatggcagcccactggaaatcggtggttggctgagcaacgttgttagcttgaccgaggcttggtatccgggcatggaaggcggcacagccgtggccaacattctgtttggcaaaaccaacccgtctggccgcatgccgtttacctggcctaagaaattagaggacgcgccaagttacaaattcggctaccaggataacgacaacgtattatacaccgaaggcctgaaagtgggttatcgctactttgataccgcccagatggaacccgaatttacatttggttatggtttgtcatacacgactttcgattatcgcaatttgcagctcaaaaaaactggtatggccacagtcagcggtagcgtcgaagtacgtaatgtaggtagccgtgatggtagcgagcttgtgcaggtgtacgtcaaacctctgcgcccgtcggtagagcgtcctcagcatgagttgaagtggtttaaaaaagtcttcgttccggccggcgagagcgtgcgcgtggattttgaattggatgaagaggcatttagctactatgacgttcgtcagggcgggtggaaagttgacattggcgaatatgaaatcgaattatgtcgcgactcacgaaatgttattgaatcctttcgtattgtgctagatagcgaatcggatctggaaaactga

SEQ ID NO: 492 - DNA, 1350 bp, Artificial Sequence
  6xHis UPI00086C34C1
atgcaccaccatcaccatcacgaaaatttgtactttcagggcagcatggacttaggcggcgttgcctatactcgtaacatggaacaggcgcacaccgattcactgatttcaatgagcgaaatcgatgatgccgtgagccgtattctccggcttaaattcgaaatgggcctgtttgaaagcccgtacgtgcagccgtcgcgggcaactgaaattattcgtagcaaagagcataatcgtttagcgcgcaaggttgctgaagagtcgattgtactgctgaaaaataacgccaatctcctgcctctgtcgaaaaacattggctcgattgcggtaatcggtccgaacgccgataacctgtataatcagctgggcgattacaccgcccctcagccggaagaacacattgttaccatcctggaaggcattcgtaacgcggtttcacctaccacagtgatccgttatgtaaaaggctgcgcggtgcgcgacaccacccagtcgaatattgatgaggcggtacgtgccgccaatgcgtctaatgcagtggtgttggttgtgggtgggagcagtgcacgcgactttcgcaccaaatacattgaaacgggcgcggccaccgttagttcacgcgaaaacgaactgattccggatatggaaagcggcgaaggctatgatcgcaagagcctgaccttgctgggtcatcaggaaaaacttattgaatctatcgcggcgaccggcaaaccgttgattatggtgtatattcagggccgcccgctgaacatgaatctggcagacaagaaagcgtcggccttactgaccgcgtggtatccaggcgaagaaggaggcaatgccgttgcgaacgtgattttcggcgatgttaatccgagcggacgcctgcctatttctgtgccgcgtagcacgggtcaactgcccgtgtattacagtctgggcaaaagtaacgactatgtagaagggacttccactccgctgtacgcattcggttacggcctgtcttatactgcatttgaatatggcaacctgaccataagccgcgaagggggtaatataactgtcagctgtaccgtaacgaatacaggtaacacagatggggatgaagttgtgcagctctacctgcgtgatcatgttgcgagcgttagtgtgccgccggtactgttgaaagacttcgccaaaattagcttgaaaaaaggcgagtcggcgcgcgtgaattttgtgttaactcctgaacagctggcgttctttaataccgatctgaaacgcgttgtggaaccgggcgaatttacggtgatgatcggcgccgcgtcaaatgatattcgtctgaaagaaagtttcgtctactga

SEQ ID NO: 493 - DNA, 1428 bp, Artificial Sequence
  6xHis UPI00097E83BB
atgcatcaccaccaccaccatgaaaatttgtattttcaggggagtatgatgagcaatctggacggcgtacgttggggtagcgccaccgctgcctatcagattgaaggtgcagtagacctgggaggtcgcgttccaacgatctgggatgtgtttactgccgttccgggcaatacaacccggggtgacaccggcgctattgcatgtcaggcatacgaaaagccggaagctatgctggaagcgatcgagtggctgggtctggaaacctatcgctttagtgttgcgtggtcacgtattattaccgggccgggtggcgaagtcaacccagagggtgtggcctactaccgtcgtatcttacaagagctgcgtgaccgtggtgttgccccggtcgtgaccctgtatcactgggatcttccgcagtggctccaagaacgcggcggttgggcgagtttagccacggcggatgcctttgtacattttgtccgcgtagcggcagcggaattaggtgatttagtcgatgattggattaccgtgaacgaaccgttctgcgcagcctttcatggtcatttgtcgggcctgcacgcgccaggaattcgcgatgaagcgaccgcacttcgtgcggcactgatgcaacttcacgcacatggtgaagcggtccgtgcgttacgtgcggttgatgctggctttcgtgtgggccttgccatgaatctcagcgacctagaaccggccagtgattcaccggccgacattgcagcagccgatcgtgctgatctggtggaaaaccgcctgttcttacatacgctgcttcagggccgcctgcctgacggaacagttgactattttggagcagatgccgttgatgcggcggtcgatggtattgacgttgctcgcatcgccgagccgatggattttatcggcattaattactacgaacataacgtcgtccgcgctgcggaactgggcaccgaccttgtagtgcgtggcattgaaaaacttccggtgcctgaaccgcgctcagcgaacggagtcgccgttcgtcccgatggctttactcgtgtactgcttcgcgtcgctgcgctgaccccggatttaccgatttgggtaaccgagaatggcattggtctttgggattatgttggtccggatgggacatgcgatgatgttgaacgggtggccttcattgaacgttacttggatgctttagaaactgcgattgccggcggagcgaaagtagaagcgtactacttttgggcgctgatggataatttcgaatggccgttcggttatcagttacgctatggcttgttttataccgattacccgactggaacgcttatgccgaaagcgagtgcagaggcctatcgtgcgcacatcgcgcgtggctcaacgagtattgatgaaacagttcgtcgtaacggtgcggcggcctga

SEQ ID NO: 494 - DNA, 1308 bp, Artificial Sequence
  6xHis UPI0009D255E5
atgcatcaccatcaccaccacgagaatctttattttcagggaagcatggaatcgcgctgttttaaccagtcgctgtcgcgcttaattgaagagggtatcctgccgcttggtactctggatgaagcggtacgccgtgtgctgcgtattaaatatctactgggcctgtttgagaaaccgtatacagatccgaaactggagaaagaagtgatgctggctcgtccgcacctggaacttgcccgtctgatggcccgtgaaagtatggtgctgctgaaaaacgatggcaacctgctgcctttggcacgtaaagggattactgtggcggtcattggcccactgattgattcacgcgccgatttactgggtacttggcgttgtgaaggcgatccggcacaggtcgtaagcatcttacaaggtattcgtaccgcgctgggtgatggcgcggcaattttgacagcgcatggttgcgatgttaccggaactaagggagagagcattccatcagccgtggcagccgcacaaaaagcagacgttgtcatagccgtagttggtgaagatgcgagcatgagcggtgaggcagcctcacgtgcccgctttggtttaccgggcatgcaagaggagctgctgcgtgcattgaaaggaaccaacaaacctattgttgcggtattgctggcgggccgtccgttggagattccgtgggcagccgacaatattcctgcgattcttatggcgtggcatggcgggacccaagccggtgccgcaatcgcggatgtgttatttggtgattattcaccttccggcagattaccggtttcctggccacgttcggcaggccaattacccctgtattataatttcaaaaatactggccgccctacaaccgaccagaaattcaccagccgttacctggatatagcgtcaactccacaattcccgttcggttatggactgagctatacccgcttcgaatatgcgaacctgcagcttgaccgcaaagaaattggtccaggtggacagttaaaagttaccgtcgaagttcgtaacaccggggagaagcccggtgatgaagtggttcagttatatatccgcgacctggtcggcagcattacacgtccggtgcgtgaactgaaagggttccagagaatccaccttgaaccgggccaggcacgcacagtgcactttagccttggtagcgatgaactgggcttttttaacgcccgcaacgagtacgttgtggaaccgggggaatttcatctgtgggtcggcccgaattcagcggaaggcgtacagggtaagtttacggtacgttga

SEQ ID NO: 495 - DNA, 2442 bp, Artificial Sequence
  6xHis UPI0009C5A3CF
atgcaccatcatcatcaccatgaaaatttgtattttcaaggcagtatgttttctgacaatcgtagtgtgtttcgcttgctgaccggtagcattctgttcgccggcttgcttgcctttttctgctggtactcaccgtgttcgcatgccatgtctgtggaagaggaagccgcctacattgtgtctcaaatgacgttagaagagaaaatcggcgtgctggttggcgatggccgctacgttcctgattttgagaagaacaccaacgatgccggccagggcatgattattgaggatatgcgttcgcaggtgattattccccgcctgccgcgcttacgtacgaccgccatgagtgatggcccggctggactgaatcgggaagccaaaaaagacggcgaagagaacttcgaatatacaacggcgtttccgacgggcacctgtctagccgcaagctggaatatggaattagtgaaacgcataggagacgctttcggtaacgaggtacgagagtatggctacgaactcattttggcaccgggcgtgaacttgcatcgcaatccgaacgatggacgagtgtttgaatattacagcgaggacccgctcctgtctggcaaaagtgccgccgctatggtacaagggatgcagcagcacggtattggcgcaaccttgaaacatttcatggcgcacaatcaacaggcgaatcgtcaccattttaatgcggtcatttcgcaacgagcgttacgggagctttacttacgatcatttgaaattgcggtccgggaaggccaccccaaaagcattatgaccagctataaccgcatgaacggcttgtacactgatgaaaacgttgaactgctccagctcttaacacgccaagaatggggttttgacgggttctatatcaccgacttcgatggcaaaggcagcgctctcggcaaagtacgcgccggtatcaatttgctcatgtccggctcgccggaggaattcgatgagctgctgactgcggttaaaaaccagaaactggatgaaaaactgttagatgaacgcctgacgaaatacattgagttcaagctgagctgtccgtacgcgcttggtgaagaaatctcagctaaccctgatttggaagcacatgcggccttagctcgcgaagcggctgcagagggcctcgttctcttaaaaaacgacaattcgtgcttgccgctggagaaggcggaacgtgtggcattattcggtaagaccgcatatagcttaatcccgtatggaacagggtcgggagaggttcggagccataaacgctctttaagtatgcacgacggtatgaaagaattagggttccagctggtggagggcatggataaagactatctggattacgtagaaaagattaagcgggagaataaagtgcctgactactttaataacccgaaaatgcgcgctgataatggcattgtgggtgatcaagcgcctaaacactttaaaggacgcctcgtggcgttcagccgcgaacgagtactgtcgcgtgaagaggtggaaggttatgcgggtcgtagcgatgtagctgtaatctgcttcggccgttcgtccggagagaactatgaaaatgggtacctgccgattacggatattgaacgtacactgctcgaaacggtgtgtgatgtgtatcactcggcgggcaagaaagtagtggtggtcctgaacgtgtcaggcgtgtgggaaacagcatcctggagcgatttgccggatgccatcctgatggcttggctgccgggacaggaaggcggtggtgcaattgccgacgttctaagtggcaaagccaacccgagtggcaaacttccggacaccattccggtcaaatacgacgacctcccgtccgcaccttattatccgggaaccccgaaagaagaaccgctgaactccctgtacaacgaaggcatttatgtgggataccgttatttcaataccttcgacgtaccggttgcgtacgccttcgggcacggtctgagctataccacttttgaatactcggaccttaaaggtgataaagagatcttcgatggttcgatcaccttttcggttaaggttaccaacaccggcgatcgagccggtaaagaggcggtccagctgtacctgaccgcgccgatggataagttggaaaaaccggaacaggagctgaaagggttcgcaaaaacgcagttactacagccgggtgaaagtgagaccctgcagtttgttctggatgggcgcgcactcgcgtcatattggagcggtatcagtgcatgggtcgctgatgctggcgtatatgttgtgtcagtaggcgcgagcagtcgcgatatccggcagactaaaacctttcaggtgccggacggtttggttgtagaaaaaacacatgatattctgtttccagattatctgttaaatgaactcagtcgcaaccgcaaagcattttga

SEQ ID NO: 496 - DNA, 2346 bp, Artificial Sequence
  6xHis UPI0009C55799
atgcaccaccatcatcatcacgaaaacctgtactttcaaggctcgatggggatgaaaaaaatcactatcctgatcctgacgggtctgttttggggagcatgtagcccggaagccattggtcaatatggcaccatccaattgaatcagaccaacgcagagcaggttctagaggccatgactctaaaagagaaagtgtcattactgactggtgaagggctgatcgggtcaagcattggagcggctggcgcgacgaaaaaattaagcaggcagggtataccgtctcttgaactaagtgatggtcctgcgggtctgcgattaagaagtacgtcaacgacctggtatccgtccgctagcctgctcgcgagtacgtgggatactagcctgatttcagcggttggcaaagcgatgggagcagaagccttagcccacggagcggatgtgattctgggccctgcaatgaatattcaccgccacccgctgtgtggacgtaactacgaatatttctcggaagatccgctgctgaccggtattgcagcgagcgccatggtgcgtggcattcaagaaaatggtaccgcggcatgccttaaacacttcgccgcgaataatcaggagacaaaccgcgacaataataatgtgattgcggatgaacgcacattacgcgaaatctacttacgaggcttcgaaatcgctgttaaggaatcagcgccgaaaacaatcatgagcagctataaccgcattaacggcacctacacttcggaggactcattgttattaacgaccattctgcgcgatcagtgggatttccagggtttagtaatgtcggattggtttggcggacgcaatgcgcccgcccaaatacgggcggggaacgatttactggaaccagggaggaattggcaaagacgcgctattctgaaggctgtgcgcaaaggtgaactggcggaagaaaccattaataccgcagcgggccgagttctgcgcctagttctggattcgcatgcgtatcgaaaacaggcacaaaaagattcaccctccggcaccggaattcaggattcggcgtgtcaggccggttaccgtgcgattgcgcgcgatgcagctgcggaaggtatggtactgttggaaaataggaatgcgctgccgtttaacgatagcattagacgcatcgcgttatttggagtgagtagttatcgtctggttgcaggcggctttggttcaggtgaagtttacgccgatcacacggttagcccggcagaaggcctgcaggaggcgggttacctgccggatcctcagttgcgtgagcgttaccagtcatacacggattcggtcaaccgcgcctataaacgcaaatggaaaaccatcacccaacgtattaccggccaaggtctgccgacagaaactgatccgggagctgaggcgattgctcgctcagctgtggagaatcaggtggcaataattactatcggtcgtcgtacgggggaatttaccgaccgcactatcgaaggcgattatctgctttccgaagaagaaaaagcgttaatcggcaacgtgtgcaaagcgttccaggcggtgggtaaacctgtcgtcgtggtgctgaatgtgggtggcattgtcgagactgcgtcttggagtggcttaccggatgcgcttttattagcgtggatgccaggccaggaaggtgggagagccctggctgatattgtaagcggcaaaaaaaccccgtgcggcagactgccggtaaccattccagcttacttagaggatcttgcctcgcacaagaactttcctctggaaggcgtgccggtcaaatggctgtcaatgatgggtaaaaaagaaaagaaaaccgcggccgagcgtctgaacattgattatacccgctatgaagagggcatatttgttggctaccgtgatgttgactcacatcgtaaagaagtggcctatcactttggctacggactcagctacactagctttctgtatgcgaaaccggacgtccgcgtggaacctgaacgtattgtggttcagtgtgtgataacaaacacgggagaaaaaaacgggagagaagtggtacaggcatacgttagcgccccggaaggcatgggcgataagccctatcaggaacttaaaggatttgcgaaaaccccattattggggccgggtgaaagctgtatggcagaaattatcattccgatggagcgtctggcgagctacgtgccgggcacaggttgggttgtagacgcgggcgactatacattgcgcatcggttcaagttcgcgcaacatgcaacaagaaatccgtttaccgggtattcccggattaattcttccaccgggtgggcgtctgccttga

SEQ ID NO: 497 - DNA, 2655 bp, Artificial Sequence
  6xHis UPI0009D4067F
atgcatcaccaccatcatcatgaaaatctgtatttccagggcagcatggcgacgcgagatattgatacaatggttgaagccttaacgctggaagaaaaagttttacttctgagcggggtcgatatgtggcatgttccgagtattagccgtctgggcattggtagcattaagaccacggatggaccttcaggcgcccgtggtaaatttgcggttgacggcccgaaagcggcttttattccggggccagtgtgccagggtgccacctggtcgcgcgcccaaattcacaagttaggccgcctgctgtgccgcgaggttaaaacaaaaagtgcacatgtcctgctagcgcccacaatttgctgcgcacgcaaccctttaggtggccgtaactttgaatgcttcggggaagatccgctgttgtcgggaaagctggccgaacaatacgtaaatggggtgcaggagaccggagaggttgccgcgaccgcaaagcactttgtggcgaatgaacaggaacatcttcgattttccatcgacgctaaaatctcagaaaccgcgcttcgtgaaatttatcttcgcccgtttgagatgattgtgcgtatgagtagcccaccgaagtgtattatgacctcctacaacaaagttaatgggcaacacatggacagtaacgtgcctattattaaagatattctgcgtaacgaatggggctataaaggtctggtaatgagcgattggggagggaccaatagcacggtagaaagcttactggcaggcttagatctggagatgcctggcccgccagaacgccgtggcgaaaaacttctgcaggcaataaaaagcgcgccgtcagatgatctcctggcagctgtgaacgccagcgttggacgtatcctggccctggcagacaaatttgacttactgggcctgtcgagtgaggaagtggaccgcactcgtgactcgcaggaggtgagctcaacggcgccagaagacatacagttgatgcgcgaagtagccgcgagcggcattgttctgcttaaaaatacgaagcagactctgccgctgcaggctaataatatccatcgtaagcagatcgcctttattggcccaaatgcgcttaatggtactccgggtggcggcggctccgcaagcatgaacccgcagtatttaagccagccgatggagtcgtttaaaaccgtggctgcgaaacacgaaatcgatgtgactgtgaaatacgccttaggcgcgtatagtcagaaatggctgcctctgtttagcaacgatcaatgggggatcaacacgagcatggagtcagacaataacccgctggttcgcgtggagtactttgcaactaatgatttcaccgggcctgtggttgaaacccaatatcgtaatagcagcaacattgacgtaagtgactcttgccccgtggacttccaggtcgatccggttccgccctactcatatcgcgttacctctagccttgtaccgaccgccacgggggaacacagctttagcttgagtagtgtgggtggcagccgcctgtttattgatgggcaactggttattgattcatcacattggacggagctgggtgaaacattctatgcctttggctcagctgaagtgagcgcttccaaaccacttgttgcgggcaaagcgtataccgtacaggtagaggcgtgggtcaatatttgcgagttcagtgcgaacgcctcctcggcggatgccaaccatgtgttcgccgcgcatccgtctgttcgtattggttaccttcagcagatcccatctgccgataaacttatctccgagaccgtagcgctggctaacgaaagcgcagttaccattgtcgttctgggactgaatgaagagtgggagagtgaaggctatgatcgcaaaagtatggcgctgccgggtagccaagataagctggtagaagctctgattagtagcgttgaacgtccggaatcgctgatttttgtgaaccagagcggcagtccggtcgaattaccgtggattgaaaaagcgtcgaccttcttacaggcttggtacggggggcaggaggccggtaatgcgttggctgacgtcttgctgggtaataccaacccatcgggtcgtttgccggtcacttggccgcggcgctataccgatttgccgttttattggaacaaggaaacatggcctggaatcgatgaagttgtgaagtacgaagaagatacacaggtcggctatcgttggtataatcatcacccggatgtactaccgctgtggtggttcggatacggcctgagctacaccattttcagctcaaaactgacgaatgtggatgacatggggatctactggagcgtgggcgtacaagtgaagaacgcgggcatggtagatggtcaagaagttgcgcagatttacaactggcctgcgggtcaaatcgaaaaaacgctgctggtgggtttcgagaaaactccgtttctgcgccccaacgaagaaattaccatccacgttcaggtacgcaagcgcgatgcagcgcactggattggaggaaaatgggtgctggatgaaggcggctacgcgtttggactgggtaacggcgtgaaagatgctatgaaaacgtcgctggaaattaaagttgagaaccatacgtggtcatcgcgcgaatatgaatga

SEQ ID NO: 498 - DNA, 1194 bp, Artificial Sequence
  6xHis UPI0008737AA2
atgcaccaccatcaccaccacgagaacttgtactttcagggttcgatgattaaaggcgtgaatctggggggttggctggtgctggagaaatggatgagccctcaattatttgcgggcgttgccgcggatgacgaatattatcttccacaagacctgtccgagactgactatcagaaccgcatcgcaatgcatcgcgctaatttcattacggaggcagattttgttcgtattgcttctatgggtctggacaccgtgcgcattccggtgccgtatttcatcttcggtgatgtgcagccgttcatcggcgccattgattggctagataaagctttcaactgggctgaggcttatggcttacagatcctcattgacctgcataccgttccgggttcacagaacggctttgacaatggcggtatcagcggcgttcagaactgggcacagcatccagatcaggttgccttcgccctgagtgtcttacatcgcctggcagagcgttacggggatcgtagcggtctgtacggtatcgaagtgctgaatgagccggccaccgaaaaaatgtatcgtaatatgctcgatcggtacccggcacgcgagccggaaatgaccgcagaaaacgcaccgatcacgttcgaatttctgtatgatttttacaagaccgcctacgaggatttacgtaccgtgctcccggcggacaaagtaatcatgttccatgatggattcgatattactcagtgggcggacttctttcagaaaaacaccttcgaaaacgtggtactggatacccaccactacctgatgattgccgaaattgagaccggagaactgaccctggatagttaccataaatatattgaaggcgttggagattcgattgcggaagtaaagcagtttgtgccggttgttgtgggcgagtggaccttatttaatagcctggccacaggtgtggatacaaaaggcggcttgaatccgacgcaggaggtgtttgatcatgaagtgacggtggacaaagatcgtgccctaaaaatttatcaagatctgtggcgtctgcaggtggaccaatggcagcgcggcgatggctatttcttttggagctacaagatcaacatcgacacgatcaacgataaagactggttcggctgggattcatggtcactcgaacgcagtgttaataagggctgggcagagatttga

SEQ ID NO: 499 - DNA, 2238 bp, Artificial Sequence
  6xHis UPI000CAC57D4
atgcatcaccaccatcaccatgagaacttatatttccaaggcagcatgaaccgcgacaacctgctcgtaaaacagcctttcgatcccggctgctataccgaacaagtaaaccagttattagagcgcatgaccgttcgcgaaaaagtgggtcagttaaaccttgaccatgtgagcgattccggtgacttgaccgactgcaacttaggcgagcgctctagcatggaagcggaagcggaaaaagttcgacgcgggctggtcggcaccatgctgatgaaaggacgcgaggaagcgaattactttcagaaggtggcggtcgaagaaagccgcctaggtatccctcttctgtttgggtttgatgtgattcatggccataaaacggtgtttccggttccgctcggcggtgcctccacgtgggacccgcagatgcttgaagaggcagaggaatacgcagctcgcgaagcctacgcggatggcattaattggatttacgcgccgatgattgatctgtgtcgtgacccccgttggggtcgtgtggcggaaggggccggtgaagatccgttattaggtagcttaatcgcacaagcgaaagtccgtgggctgcagaccgtgaatccggaaaccggttacccctacgtggcagcctgttttaaacatttctgcggctacggcctgagccaggggggccgtgattatgaagagtgcgagacaagcccacgtacgcttttcatggactacatgaagccgtaccaggccgctgtggatgcgggcgccttatccacgatgtcggcgtttagcgtattaaatggacaggccgtcactggctcccggtattacctgacggaagtactgcgcaaacagttcgggttccgcggctttgtgtgcagtgactatggcgctgtgaaagagctggtacaccatcgtgtcgcagccgaccgtaaggaagctgcggcccaggctctattagcgggcgtggatgaagatatgggaagtcacgcttttgcggattactgcgaggctctctatgaggaggatcagcggtttgcggaagcagtggatgaggccgtccgtcgaatcttaagcgtcaagttcgccgtgggtctgtttgaattcccttacttcccggaagaagcagagaagtacatgttagctcctgaggcccgtgaagcggcacgtaacgtgggccgccattcaatagttctactgaaaaatcaagagaaaattctaccgctgagccccagcaaaaagtatttcctgacgggtccgctgagtgataacgtggaagaaatgccgggcgcgtgggcccagtaccaccctggcacgaacgttatttcagtgaaaatggcgctcgaagaagcgggattagattttctgcagagcgatggctgcccgttcacaggtaaatactgtttcgatagccaggatgattctggtttcgcgaaggcgcttaaaatggccgaagaatgcgacgaaatcatatatgtgtgcggagaaaaagcggcgtggtcgggggaaaatcgcggtcgcgtgagcattgacctgccgaagcagcaataccgctatctgagagagctgaaaaagaccggccgcaaaattatcagtgtgctgatgtgcggtcgtgcgatgagctgccaggaactcgccgagtcgtcagatgcactggtgctggcatggcatctgggcactgaagccggtcacagcattgcggatgtcctcttaggttcgtatagcccatctggtcgtctgcccattacctttccgtgttacaccggccaggtcccttattatcatagctggttgagctcgggccgctctcgcgaatccctgatacgttacaaggatggtgaaaacggcccgttatacccgttcggctatggcctgtcttatgccgaaattacctatgatgctgtgcacatttctcgcaaccgttggaaagccgatgagacgattcgccttgaagtagtgctgaccaaccactcggagatggatgcgtacgaagtggtgcaggcgtattatcaagatgtcgtcagctcactgccgactcccgatcgaaaattatgcggttttaccaagatcttagtcccagcgggtagcaccgtaaaagcacagatgctcattccggttgaacgtctggcattgatgacgctggacttaaaagaagtcgtagaaccgggcgaatttattttatttgtgggccgagatagcatgtgtggtgagagcgcgcgcattgttgttgaatga

SEQ ID NO: 500 - DNA, 2538 bp, Artificial Sequence
  6xHis UPI000D237A4A
atgcatcatcatcatcatcacgaaaatttatattttcagggcagcatggcggatattgacgtggaagatgtgctgtcaaaacttagcctcactgagaaatgcaaccttctctccggcggttcattctggcgcacccatgcgattccgcgcttaagtataccgagcctgtgtattactgatggagcagatgcagtccgtggcagccgtttttttaactccacgccgtccatctgccttccgtgtggctcagcgctggcagccacctggaacactagcctgatgcaacgtctgggagccctaatgggggacgagtgccgtgctaagaaagcccatgtactgctgagtccgaccattaatattccgcggagcccgctcgcgggccgtattcatgaatgttatggtgaagatccgtacttggccggcatgctggcaggcttcttcattcgcggggtacaagaagaaggcgtagtggcgaccgttaaacacttcgtttgcaatgaccaggagcagggtatctttgcgatggattgtgttgtatcggagcgagctctgcgtgaaatttacctgcgcccatttgaacttgcgattgaactgggtcagccgggcgccgtaatgacggcatataataaagtgaatggtacccacgttaccgaaagcgtggatctgctgcgggatctcctgcgtggggaatggaagtaccagggcctggttatgtccgattggtttggcatgtacggcattcgtggcgccgtagaagcgggtgtagatttagaaatgcccggaccgggtcaatggcgcggcaaacagctggcccatgcagtggcggcgaggaaaatagatatcgaagtagtggatgatcgtgtacgcgccgttctgaatcttgtaaagcgtgcgacggcggccggaattgaaggtaccgatgaagaaaccttggatcgcccggaagatcgcgcattattgcgcgaggcggctaccgaatccattgtactgatgaaaaacgacgataacgtcctgccgttcgacccgagcaaaccgatcgctgtgattggaccgaatgcgaaagtggctgcttatcgcgggggccgtgttgctcatcttcgtccttatcatactgtagcgccctttgaagcaatcaaggacaaaagtaccgccgaagttttatttagccaaggtctgtacaatcattgggaacttccgttacttggagcgcagatgcgtacgagctccggcaaggtcggctacgacatgtatatttactctggcccgcctgggagcaccgaaccgcgtaaacgtttagaccactatgaattacttaactcgtgcgggttcttttttaattacccggacaagaatttacggcgttggagcattgacattgaaggcacctttacaccggataccagcggtctgtttgattttggtgtgagcgttcaaggcacagcgtccctgtatgtggatggtgaactagttgttgataacacgacgaaccagaagaaagctgatggttttttccgcaacggaacgattgaagaagttggctcgatgcacgtcgaggccgagaaaacctatcagatcctgtgtcgctggaacagcccagagacttcggccctgttggagaacgatgaacaaaccttcaaacccggtaacattcgcctaggaggatgccatcgtcttgacactgacgaagctattgcagccgccgcgcagctggctgcggaagtggatcaggtcgttgtgctcgccggctttattggcgaatgggaaagcgaagggaatgatcgcaaaacaatggaactcccgcccaacacagacggactgatcagtaaagtgctacaggcgaatccgtcagcggcgatttgtattagttcaggtggcccgtattgtatgccttgggttaatgaagctaaagcgttgcttcaggtttggtatggtggtaatgaaaccggtcatgccatcagtgacgtgctgtatgggatcaagaacccgtccggaaaactgccgattacctttccgattcgtcttcaggataatccggcctttctgtgctcccatgctgattacaatcaggtgctttacgcagatgacatctatgtgggatatcgcttttatgataccgtggatcgtgaaaccctgtttccgtttggacatggcctgagctatacccagtttgagatgggcaacatcgaagcttttgtagaaggcgatgtcttgttggtgtcctgcaccgtaaagaacgtgggctcccgtgatggcgtcgaaaccgtgcaggtttacatttcacaaagctcaccgtcaattcgctgcgccgcgaaacagttgaaaggttttgagaaagttggagtgcgcgcgggagaaactgagcgtgtaacgcttcgtctcgatctgtggaacgccacggccttctggaatgtggacaagcaccagtgggttcgcgaacagggagattataacgtcatgatcggatgctcaagccgtggccgcttcggtcatgcactgtttagtctcccttccaccgaaaaacgcgtgagcggtaaatga

SEQ ID NO: 501 - DNA, 2694 bp, Artificial Sequence
  6xHis UPI000D77C91D
atgcatcatcaccaccatcatgaaaatctctactttcagggctcgatgagcgcccccattgatccccaggcgttgcttgcgcaacttactctggaggaaaagatccaactgactgccggagccgatctctggcgcacagttgcaattgaacgcctgaaaattccgtacattaagctgacggatggcccgataggagcccgtggtggcggtgatttccatgatagcactccgagtaccctgttcccaagcccgtcgtgtctggggtctacatgggataccaaactggcgtatgaaatgggaaaacagatcgccctggacgggattgaaaagcaatgtcatgtcatcttaggccccactattaatggccagcgcgatcctcgcgcaggccgcttcttcgagagttatagtgaagatccgactctgatgggctttcttgcctctcactgggtccagggtgtccagtcttgtggagtgggcgcgaccatgaaacacttcgttgcaaatgaagcggaatacgatcgccgtaataacagcagtgacgtgtccattgaagcgctgcgagaagtataccttgaaccgtttagaattattatggccgatatgcagcgaaaagcgtcggcacacgatgatcccttcaaatttcagcccgcctgcgtgatgactgcctataatcgtgtgaacggtgtgagctcctcagaaaatgatgcaatgatcaccgatatcttgcgtaaagaatggggctttgatggcctggttatgagtgattggttcgctatgcacgcaaacgcatttaacgccaccgacctggagatgccgggaccgactatctttcgcaccattgagaaaacaatcgacacaattaaaaagggcgatgaagaaggcaaaaaaatggcaaaagacctggaccgttgtgtactgaaggtcttagaactggtgaaaaaagttcacaaactgggatatcaaaaatccgttgccgacgaagtggaaaagagcgttccgattgagcaagtgggccccgcaatccgcaagattggagcggaaggggccgttcttttgaaaaacgacaacgatattctgccgattattccgaaaaaggatttaaaaattctgtgtgttggcgccccgtggatcgaagcagttcaatcaggcggcggtagcgcgaatctgacaccccagaaagttatgcaaccgctgagtacgtttaaggatgcgctgaagaatgaaaaaggcggccaggatgttaccgttaatcatcataatggtattggcatccacaacttcgtgaagccgcttgaacagtcaattaaattggatttcctgacaggtcgtcagccgggaaaaggcgaggtcgttgcttctaccacgggtcagaaagctacgttatccacgatgttaccgaaaccgaaagaagttccgtggaacgactattgggtgcgcggatccctcgacttagaacccgtaaaaaaagattgccaactgcgcttcggtctgctgggcttgggcaccatcacggcgtatctgacgattgacggtgataaaagcaaacagagcatttggaatttcgatggcgagactgacctcttcgaaagcattgtcaacccgttacgcaactggcaggagaacgtgatcacagttaaggccggccaaaaaattcaaattgaggcgcatttcgtacctcgcttagtgggtaaggaacatggcgatgcaaaatatggcggatttcagattggcatggaggaagtcgatgacgaagatgccctgatcgctgaagcggttcaacaggcgaaagaggcagatctaacggttattatgaccgctgtaggtaaggactgggagtcagaaggattcgaccgtccaaccatctttctgcctcgccgtcaggatgacctggtaaaccaggtaacgaaggcatgcccgggtaaaaccgtgatcctaaatctgaccggttcggtcgtagaaatgccgtggcgtaacgatgccaccgggattgtgcagtgctggtacgggggtcaagaaggtgcggtttcgctgtccgacatcctgctcggtcgaggtgatgcgcctgcatctgggagactggcgcatgtatggccggcgcgcattgaagatcacccttctggcgtagatgaagcgtacttccctggcacccatttacctaacgataaagaaggtccgcataccgaatacgtggagggccgtctggtgggctacaaatactacaacaagaacaagaacgccaatcaaccggcattccatttcggcgaaggcctgggtgggtatactacatttgcgaccgaaggtcctgttgtcaaaggctcgaccaaaatcaacaaatctagcctgccgctgtcactcacggtaaagtcaacgaataaaggtaaacgcagtggcaaagaggtggcacaaatttaccttcgcccgcacgtgccgctctcagatgcgaaggatgagcctatacaacgcttagcgggtttcgcaattctgcgccccgcacctggacagtcagaagaagccgaaattcagctgtaccaggaaacctttagtcattgggatgaaaaatcccgctcctggcaagtgaaacaaggtgactatgatctggtcctggcccgttcggcgcgatatggcgaagagttaggcaaagccaccattacgatcgatcagagctggtcttggactggcacgggagttaactga

SEQ ID NO: 502 - DNA, 2544 bp, Artificial Sequence
  6xHis UPI00004E1F76
atgcatcaccatcaccaccatgaaaacctgtatttccagggttcgatgaaagctaccacctccttagcgacgagctgccgtcgtcttcttttatggggcgttcttaccctccaatgtctgttcagcactgcgcaaaaacgttttacggcggatgttgaacagcaagcggagaaaatcctgagtcagatgaccttagacgaaaaactgagctatattggcggaattaattggatgtacacccgtccgttagaacgtttcggcattccgcggttgaaaatgtccgacgggccccagggcctgggcacacatggtccgtctaccgcgtatccatgtgcgcttatgctggcggcaacttggaatgaacaactggcaaccgaatatgggagcgcgcttggcaaagattgcagagctcggggggttcacgtattactgggtccggccgtgaacatctatcgtgctccgatgtgtgggcggaattttgaatatatgggggaagacccgtacttgaccagtcgaatggcgaccggctacattaaaggcgtgcagggccaaggcgtgatggcgacgatcaaacattttatcgccaacaattcagactatgaccgtgatcacatctcctctgacattgacgaacgcactcttaacgaaatttattttccgtcgttccgtgcagccgtgcaggaagcggaggtcggtgcggtcatgagcagctataacctgcttaatggtatctacactaccgaacacccgtggcttctgaaagatgttctgcgtcagcagtggggttttaaaggtatcctaatgagtgactggggttcgacacaccattgtatcccggcagtgaaaggaggcctggatcttgaaatgccggccgggagcaaaatgcaaccggaagaattaaaatattatctgcgtaccggagatatcaccattgagacaattgatgaaaaggtgcgtcatatcctgcagaccttgctcgcgtttggctttagggaaacccagcagccggacacccacattccgctgaaaaatccgcaatgcgcacaaacggcgctaaatgtggcaagcgagggcctcgtgttattgaagaataccaatcagattttgcctatccgaagcgggaaagtgaagacgatcgcggtcgtgggaaaaaacgcacaaggttatgtatgcggcgggggatcaggtgaagtacatcctttccagtatgtgagcgtcctcgatgggattcgcaaagaagcagctgagcgcgatattcgcgtggagtatctcgatgtttatgattacttgccgaccataattttcaccgacacggagcgtaaacagaaaggttttcgcgcacaatattttgacaatatgaacctggaagggaccccgaaagtggaacagacggaaactaagatcaactacagctggagcggcggcacagggctgaaagagatgccaaaagagcaattctcggtgcgctggaacggcactatttgtccgcaggaaaccgacgagtacctttttacactaggcggcgatgatggttacaggctgtacattgatggcaaattgatagcagacgaatggcacgaaggagcgttccgaaatagtacgtatcgttgtatgctggaagccggcaaaaaatacgatttgaaaattgagtacttccagaagggcggcggcgcggcggtgaatttcatttggaagcagaagaatgccagcaacaatttgttcgtggaagcgctgaacaggaacgatttagtggtcgcgtgcatcggcttcaacagcgatacggaaggtgaaggacgtgatcgcacgtttgaactacctgaagatgaggcccaattactgcagaatacgttgcagtcaaaacgtccggtggtgggcatagtcaacgccggtggaaatgtcgaaatgcagtcctgggagcccagtttgaaaggcttattgtgggcgtggtatggcggtcaagaggcaggaactgcgatcgctcggaccttgtttggtgagttgaacccgtcaggtaaactcccgatcacttttgaaaagcgctgggaggataatccgaccttccatagctattacgatccggacggcgataaacacgtggaatacgccgaaggaatttttgtcggctataggggctacgacaaactgaaacgtgaggttcagtatccgtttggttacggccttagttatacccgctttaaactgtccgcgcccacggttggtacaccgaaaacagatggttccgtgaccgtcacctgtaaactgaccaacacgggccgtaccgccggggccgaagtggttcagctctatgtgtccaacaaagatacgaccgtcgagcacccggaaaaagaactgaagggctttcggaaagtgtatctagagccgggcgagactaagtctatcgaaattacggtacccgccgaagcattcagccattatgataccggttctcgccgctttgtcatcgatcgtggttctcatgacatcctgctgggctttagtagccgcgatatcaaggccaaaatgagcgtagggattagccgttga

SEQ ID NO: 503 - DNA, 2328 bp, Artificial Sequence
  6xHis UPI000F0C30E8
atgcatcaccaccatcaccatgaaaatttgtattttcaaggcagcatggtggactggttagagcgtgttcttacctcgggccgtgctccgtatcagacccgtgattatgcggtttatcgtaatgtccacgattatggtgccaaaggggatggtttaaacgatgatacaaatgcaattaacagcgctattagcgatggcccgcgttgcggcccccaggccgattctacaacaaccgccccggctttagtgtacttcccgccgggcatttatcgcgtatctaaacccatcgtgagcctgtacctgacccatctgctcggagatgccaccgaacgaccgtgtattaaaccgtatgcgcacttcgaaggtattgctgtcattgatgaaaacccatacggcttctctggcaagaattggtacaccccgcagaacaatttttttcgcagcattagcaacttctgtattgacctctcggaaatgcctccagaatacggaacgggtattcaccatcaggtatcacaggcgactggcctgtgtaacgtacactttgaaatgcgcaccgatcccagcacccaacaacgcggtattttgatggaaaatgcgagtggaggatgcatgtctgacctgaccttctatggcggtcgctttggtgcctggatgggtaaccagcagttcacggtccgtaatgtacgcttctcgcaatgccagacggcgatttgcctgcactggaattgggcatggactttaatggacgttcacattcatgactgccatgtgggtttggagatggtaggtatgttgcctgaacgtcaaggtgttggctctttaattctgagcgactggtatatcgcccatacaaaacacgcggtgcagctagaacgcgaaggcactggccgcttgattctggaccacgtgcgcgttagccatgtgcaatcaattgtgcatgggccctatcaatcgctgctctcgccgcgcgatagcaatgatctggtcaaatattggctgaaagcgccggcttcattagtcactgcgcctacagcgctgcgtcgtcaggaaactctggatggtccgatttatgtgggcgacatgattccgcccgaaagacctgcatgcttagtagatgaacacggccgctggtttggtagagaaaaaccgtcgtacgccacctggtctgacgttgttaatattcaacaatatggtgtgaagggcgatggtatgtcagacgacacggctgctatgcaatcgttactgaatgaaaacgtcggtcgcgtcgtttttgtaccgtatggcgtttacgtcctgcacgatactttaaatattccgattggtacctttttagtgggcgaagcccagcccatctttctgggtacgggccctgcgtttcaggatgtgcagaatccgcgtccggtcgtacgtgtgggccgcccgggtgatagcggtgatttactgttggccgatttagttttctcgacccggggccacactcctggcgcgattgttatggaatggaatgtgcacgaacgtgcacagggatctgttgctatgtttgatgcccacatccgtatcggaggtttttgcggctccgaacaggagctcgcacagtgtcctaaacaggcatctttaacggatctgccgagagccgcgtttctgagtctacatctgacgaaatcagctagtggatactttcagaacgtttgggtgtggaccgcggatcacgaattagaccaaggcacaccagaacagttaaatgttctgacagatcggggagttctcattgagtcccaaggcccagtgtggatgtatggcacggcaagcgaacatgcgctgttgtaccagtacagccttcatcatgccgcgaatgtgctgctggctatgattcaaaccgaatccccgtatttccagggccataactttgaaccggcgtcaaagagcgtagtgagccatccgaagtatcctgatccggactgcgcgaaacgttacgcccgcggaccaaatgtgccggactggacctacgatactgtaatggaagatcgtgccctgggcttgcatattagtcatggcaccgacatctttgtcctggggtcgggtcagtattcattctttgatagctacggccaacgatccctggccgaccatgcgtgccagcgtcgcttatgcgttctggaacgtgatctgtcaaacgtgtggttgatgaacctcgcttctgtgggcgcccaggtgattctgtctgtggacggcgccgattatgtgatggagcgccctcatcgtgaaggcttctgttccactctctcgctgtgtgcgattagcgcagaacatatctacgtggtgtga

SEQ ID NO: 504 - DNA, 2571 bp, Artificial Sequence
  6xHis UPI000FFFEFB2
atgcaccatcaccaccaccacgaaaacctgtattttcagggtagtatggcgtctctccgtaccgacgatgtcgaacagctgctgcagttaggttatatggctaatcagagggacaagccagcccgtcatcgcttgccgcaggacggtccgagcggggcgagaggtcaattagcggtagatggccccaccgcggccttcttgccgggacctatttgccaagcggcgacgtggtcaaagcaacagttgcgcagcgtcggtcgcctcctgtgtgaagaagcccgcaccaaggcagcacacatcttactggccccgaccatctgtctgtctcgtaacccgttaggggggcgcaacttcgagtcttttggcgaagatccgttcctgaccggaagcctggctactgaatatgtggcaggtgtacaggaaaccggtcaggttatggcgactattaagcactttgtagcgaacgagcaagaatggcaacgtttcaccattgatgcgaaagtgagtgaaaaggcgttgcgcgaaatgtacctaaaaccgttcgagatggttgttcgcagcaacactaccccaggctgcctgatgaccagctacaatatcattaacggcgtacatgcggacatgaaccgacgtctgatccaggaactgctgcgtggcgactggggcttcaaaggcttggttatgagcgattggggtggcaccaattcgacggtagagagcgttattgcggggctggatctggaaatgccggggccgccgagcaaacgtggtgaattgctgctggatgccgtcaaaaaagcggaatcaccggatgagctgctcaaagccattgatagctctgcaggtcagattctatctatgtgtaagcgcatgggtctgcttggtctgtccgaagaggaggcacttcagacccgcactcagctggaacaatcgtcaaccacgcaggaaggcatgaaactgatgcgcactgttgccgcaaaaggtgccgtactgttaaagaatgataagagcacgcttcccctaaagccggcaagtttgagcggtaaacaggtggctttcattggtccaaacgccctggttggcacccccggcggaggcggaagcgccaccatgaacccgcagtatctgtcgcagccaatgacgagtttcaaagcggcggtcgaagcgcagggattagatacgcgtgtggtgtatacccaaggcgcgtattcaaaaaaatggcttcctttgtttaaaaaagatcagtggaaaagccgatcatccggagaagatggcaaaaatttggtgcgcgtggatttttacaccacgcgcgatctgagcggtccaattctagaaacgcagcatcgtaattctagttgggtggacttcgtggactcagcgccgctcccgctgcaaaaagcacatgtaccgccgtacagcttccgagtgactagcactgtgcgtccgcagactacgggtaaccatcgtttcggcgtggcatccgtgggggaagctcgcttatttatagacggagagctggtactggaaaactgtaattggaccgaaaccagcgaagcattcttttctttcggaagtcgagaaaagatttctagcaagcacatgaatgccggccagacgtatgatcttgtcgtggaggggtggaccaagccgggattaagtgaggaagaaagtctgcacttcttcgcaggtcacccgagcgtacgtattgaatttgaagaagaattgccgaaaaatatgatcgatacggcagtgaaaacggccgatgaatcagactatagcgtggtaattttaggcatcgatgacgaatgggaaagcgaaggctatgaccgccagttcatggaactcccgggcactcagaatgaattggcagaagcattgctcactcgctgtaagcacccggaacgcctcatcttcattaaccagtctggttcaccggtggaattaccgtgggaagacaaatgctctactctggtgcaggcgtggtacggtggccaagaagcgggcaatgggttggcagatctcttattaggcgttaccaatccgagtggtcgcatgccgatctcgtggccgcgcaagtatacggatctgccctacgccgcagacaaggagatgtggcccggcgtggatggtaaggtgatctataaagaggaatgtcatctgggctatcgttattacctacacaacaacgtgcagccgcacttttggtttggctacggtctgtcatatacgcagtttgaaagtagcgtccagcttgaagtgcgtaatccggactcttggggatttaacgtgacggttaaaaacgttggtagcgccgatggggaggagactatccagctgtatgcgtggccgagccggaaagaagcagaacggcgcttagttgcgtttgataagactccgatgttgaaacctggagaggaagcgagctcacgtttgactgtccgcaagcgcgaattagcctcctgggaaggcggcatcgacggccaatgggtgtttccggaaggtgtctggcagtttgcggtggcgaaacacgcgggcgatatcgacgtgaaagctatcgaagtgccggtttga

SEQ ID NO: 505 - DNA, 2394 bp, Artificial Sequence
  6xHis UPI0010251887
atgcatcatcatcaccatcacgaaaatctgtactttcaaggcagcatgtctagctcggatattgaggatatcatttcgaagctgactctgagcgagaaaattaaactgcttaccggcttgggatggtggcataccgaacccattcctagcgctggtattccctcgatgcgcttttcagatgggccgaacggaattcgtggtactcgtttcttcaatggtgtgccaagcaactgtttcccgtctagcacgggcttagcggcctcttttgatctggaattagcgcgtgaagtaggtgaggctctgggcgaagaggcccgcgccaaaggcattttggtccagccgcgcgagggtgaagtgagtgaaagggcgctgcgcgaaatttacctgaaaccctttcaaattgcgattaaagaatcaaacccctgggccctgatgacggcctataaccgcgtcaatggagtgcacgttagcgaggatagccgcctggtagatggcatccttcgcaaagaatggggctttcagggcatggttatgagcgattggattggcgtttacagcaccgtggaatctattaaggccggcgtggatttagagatgccgggaccgtcagtgatgcgtggcagagctgttgaacgtgcggttattgcgcagaaactgttcccggcggatatcgacgcgcgtgttaggaagatcctgggcctgcttaaacatgcccgcgagagcggcatcccgtttgatggtccggaggagccgctggatactccagcgacccgtgcgatcttacgcaaagcggcggctgagagcgtggttcttctgaaaaacgaaaagggtctgcttccccttggggagcaggtccgtaaaatagccgtaattggcccgaacgcgaaagtggcagttacttccggcggaggctccgcgcgtctgcgctccacgtataccgtgtctccactggaaggcattgttgaagcggctaaaaagacgggtgcggaagtcacgtacgctttgggtacatcgagttatcgtcaattaccggtgttaaatccgtatatatccaaagccgacgggggtccgggtatggacattgacttttggaatgatgaaccatcagcggatttcttagccctacagccggaattcacaggccagtttaagggtccgacttggaccacctcaacgttaaatacggaatgcattatgttcgacggcatcgtcgattgctggatgaggttcacgtgcaccttcacgccggatgaaagcggtgattgggagttcgagctgaatctagcgggccgaggtaacctgtttgtggatggaaagcttattctggatctgtctaccaacccacccaaaggggagtcgttctttgagttaggcactgccagcgttcgcgccgttgtgcaaggtttgaaaaaagatcaggcatatcgcctggaactgcgcctgtcttccgttgaatttgttggccgcgggccccctattcagtgttggggtggtatccgcctgtcagcgatacataaaaccgatccggaagaagggattaaaaaagctgctcaacttgcgaaagaatcggacgtagcaattgtcgtggtgggcttgaatcatgactgggaaaccgaaggtcacgaccgcgcagacctggagctgcccggtttaacgaaccgtttagtaagcgaggtccttaaagcgaaccctgcgactgttgtggttaatcagtcgggtagtgccgttacgatgccttgggcaaaggaggcatctgccttggtgcaggcgttttatggcggcaacgaactgggcaatggtttggcggatgtgctgtttggccgcgttaacccgtctgccaaactaccactgacctttccggctcgcctcgaagatgtgccgtcgtatgcatcttttggcgatcgtgtacaggaacacggtaaggtgttatataatgaaggagtatttgtcggctatcgcggatatgagatcaagaatgtgcagcccttgtttagctttggcttcggcctgagctacagcacgtttcaatacgataatctggaggttacggcgccgaccccggaaggctcttttaatatttccttcaaaatcacgaatacctcgaatattgcgggaaaagaagtatcgcaaatttacgtgtctgacccggaatcgtcgctgccgcgtccgcgtaaagaactgaaaggctttgcaaaaacggagctgaaagcgggcgaaaccaaacgcgttcagattaccctggaccgtgaggcgctgggtttttacgatgatcgccaggcccgttgggttgccgagaagggtattttccgtgtttctgtgggtcagagcagcgacaagatcgttctggaaggtgaggctaaacttgaggaacggattgtatggaccggactgtga

SEQ ID NO: 506 - DNA, 2712 bp, Artificial Sequence
  6xHis UPI0000E69509
atgcaccaccatcatcatcacgagaatctgtattttcaaggctctatgccgccctctaccttaggcctgaccccgccattcgatgccaccctgctcaccacccggcccccgtgttcacgccgtcatatcagccgttctccgggagcacgtcgcccgagcccaggacttttaacttgtctgcagccgaatgtgtgtccgagggcgcgcagtgcctttctagcgatcagcaatggaagtcgtcaacagagcggccctgcccgtgctgacgcgtttcaccctgtgtctattagcccattttatttctactcggattcctacgaagatgttttcatgccgatcaccacgaaattaaaagcagtaagcctcggtgtgagcctggcgttagccggccttttagtcggttgcaatcaaaacgatagcgacccgctggttaaagatgatgcgtattatcgcggccaagccgaggcaatggtggccaaactcactctgggcgaaaagttagatctgttatcaggcccgggttatgggtcggccaacggcgcgatcaatgttaaacaggatgtgccgggcgtagctggttatattaacggcgtgttaagaagcgcagatggtattgatataccggctcttaaactggcagatggcccggctggtgtccgcatcaatgcaaatcgcgatggcgactcagccagctactacgctacggcatggcctatcggcagtctgttagcttcgtcttgggatgtgaaactggtgaaagctgtcggtgaagctatgggcgacgaggtacggcagtatggcgtagatattctgctggccccgggtatgaacatccagcgtaacccgctgaatggccgcaacttcgaatactacagcgaagatccacttctgaccggtaaaataggcgccgccatggtaaatggcgttgagtccaatggcgtgggaacaaccattaaacattactttggcaacaacagtgagacgaatcgtaatcagattaacgatattggcgaaccacgcaccttccgcgaaatctacctgcgcggatttcaaatcgcagttgacgaggcacagccatgggcagtaatgactagctacaataaagtgaatggaacgtacgtaaatgaacgccgagatgcagtaaccgacctgctccgtggcgaatggaaattcgacggtctggtcatgagtgattggtttgcgggcgatgtcgcgaacaatgcttacaagcaggtcctggccggtcaggatttaatagaacccggaaacgtcaaagaacagctgcagcagtcgatcgaacacggcgatctggatgaggccaaggttaatgaagcggctattcatattctgacgcaggtgatgaaaagtccgtcttacaaccaattagcgattagcaattcaccggatctgatcgcacatgcgaaacttgcgcgacaggccggagcagaaagtatggtgctgctgcgcaacgatgcggcagctctgcctttagcggcgagctcaacccttgcctcatttggtatcaaccagataaacacgtataagggcggtacgggcagcggtgacgttaatgccgccagcacgacaacaatcgcgcagggtctcgcagcgcgctttccggtcaacgaagccctccagtcgtactatcgtgacttctacgaaaacaacaaggtgtatcatgagggccaattcggcgcgaaaggctactacacctgtgcggaggcccctatcagtggcgatcttgcagctcttattgcgaatgcggcaacgacccagcaggctgcggtaatcagcatcggaaggcaagccggtgaaggcgcggatcgcagcagcggaaaaggagattacttattgggcgatgacgaacgggcgttgattgatgcagttagtagcgcattccatgcacaaggcaaaaaagtcgtggtagtgctgaatgttaacggggttattgatacggcccagtggtctgataaagtagatggcattctccttgcatatatggccggccaagagaccggtcatgctgtggctgacgttttaagcggggccgtcaatccgtcgggcaaattggcgcagtcatttccgcatagttatgccagcgtgccgtcggcaggtacgttcccgggcgaagatactgatggcgatggagaaccggatgatctctactacaatgaaggcatttatgttggctatcgctattattctacctttgaacaggcggtctcgtatcccttcggttttggcttgtcctatacgtcttttagttacaccagcccggccattgcgagcaacaccctggaaggcggttcagccggcaatctggtcctgactgctaccattaccaacacgggcgcggtcgcgggtaaagaagcagcgcaagtgtatgtgacggctccggaagtcaaactgaagaagccgctcattgaactaaaggccttcgcgaaaaccgcacagttagcgccgggcgccagcgagcagttaagctttacgatccctgcctccattctggccagcttcgatgaagcgtccaaccagtggattgtagaaccgggacgatatagtgcgtacatctcgccgagcagcgatgttagcgcgtcgactccggtgtccttcaccgtgagcaaagaaatcgttgtcagcaatacgacgccgggagctctagccctgccggccggtgtggatccagcttccgtgacgaccattacacgatga

SEQ ID NO: 507 - DNA, 2472 bp, Artificial Sequence
  6xHis UPI00000B86CB
atgcaccatcaccatcatcacgaaaatctctacttccagggaagcatgacgggcggagaacgcgtgaagcgccttgtaattcgcattgcgccccttctgctcgttgttccgcttctggtggcagcggttagcccggtgcgtcattcccagcgcgtggatgaactgattggccagcttacgttagacgaaaaactgtcgttcgtttattgggactacaacgaaaaagatcctctggcaaaactatggctaccgggggtccctcgtctgggaattccgcagattcggggtaccgatggccctgccggtgtcacaattcaccagcccgcaatagcaatgccggcaccggtcgcactggcttctgcgtttgacgatcgtttggcgcatgaatatggcacagttctgggtcgtgagggccgcgcgttcgagcaagacatcatcttaggccccatggtcaacaacattcgcgtgccgcaggcaggccgtaatttcgaaacctttagtgaagatccgttagtaaccgcccgtactgccgcggcacaaattcgtggcattcacagccaaggcctcatgaccagtgcgaaacactatgcagcgaacacccaggaaaccgaccgtttcactattgatgtagatgtggatcagcgcaccctacgcgaactggaactgccgggctttgaagcagcggttgccgccggtgctaccagtgtcatgtgcgcttaccctaaagtaaacggcacccatgcttgtggtcatcgccagctgttgacagaaattctgaaggaacaatggggctttaaaggctgggttatgagtgattggaccgccactcatgcgaccgaagatttagttgccggtctggaccaagagatgggagtggaagtgcgcgaagatggctcgctgttccgcggtaaatatctgggcgaagcgcttaaaaaagctatccgagaagggcgtataccagagagcgcgttggatgcgagcgttcgccgcattctaacccaatttgagcgctttggcctactggatgaaactaaaccgccgcgcccagaacgcgatgttgccggcggaactcgtattgcgcaggaagttgcggaatcaggcgcagttctgctgcgaaacgaaggcggggttttacctctggacccggctgcgggtcaagatatcgcggtgataggtcctagtgctcaacaaccgaaggtgaccggcctgggtagcagctatgtcgagcccgactttgccaatgcaccgctggatacgatcacacaacgtgtcggctcgggtgggcgcgtggggtatagcgtgggcgaggaacttaaaggcgcaccgattccggaaactgcattgcagccagcgtttgttccgggggaagtgacccctccgcctagtggtggcgttatttacgatggccggttgaaagtagatgctgatggcttatatagaattgccgcgcgtatcgatggagggaacggtagcctgcaaatagatggcggggcgccaatcggtgtgggtgatgttttcggcccgctgacaagcgtcccagtgtggttgacaaaaggagaacataccattcaaatgaccggagcagcgcctgttggagggggcagcctagatgttgatctgacctgggttaccccgggccacgcacagcgcgagtttgatgctgcggtcgaacgtgcgcgagattctgatgtggcggttgtattcgcctatgacgatggtgccgaaacggcggatcgtaccagcctctcattacctggaacccaggataaattaatcgatgccgttgcatccgtaaatccgaataccgtggtggtcttaaacaccggaagttcagtaaccatgccctggttggataaaaccagagcagtccttgatatgtggtatcctggtcaagcgggggccgaagccacgaccgcgctattattcggcgatgcggaacctggagggcgccttacgcagacgttcccagtgagtcaggagcgtactccggttggcggtgatccggcgcgctttccgggcgtggacggcaaggtgcactacagtgaaggtatttttagcggctatcgttggtacgaccgtgagggtgtggatccgctgtttcctttcgggcatggcctcagttataccacctttgaacgcacagatccggttgtggaacggactcgcgacggcttagatgttacagtcaccgtgcgtaacacaggtcaacgcagaggctcggatgtagttcaggtttaccttggaccttcccctcaggtaccgttagatcaagccccgcgtcagttggcgggttatcagaaagtggagctggcgcccggagaaaccaaacgcgtgcgcgttcatgtggccgagcgagctctccaacattgggatgaggccgctgggggctggaaattgggcggcggcaaacgcgccgtggaaatcggttctagcagccgtgatattgatttgcgcgccgatatcaacctgtga

SEQ ID NO: 508 - DNA, 1479 bp, Artificial Sequence
  6xHis UPI000180240E
atgcatcatcaccaccaccacgaaaatctgtatttccagggtagcatgagtactgcgcaaccgttaagcttcccggctcattttcttctgggctctgccacggctgcgtatcaaattgaaggtgcggcggacgaggatggtcgtggtccgtctatctgggatacttatagtcataccccgggtaaaacctggaacggtgacacgggcgatgtagcggccgatcattaccataggttagatgaggatttagatcttatggctagtctgggcttgaaagcgtatcgcttcagcattgcctggccgcgcattcagcctacgggccgtggtccagcaaatccgaaaggcctcgatttttatagccgcttagttgatggccttctgcaacgtgatattgtgcctgtcgcgaccttataccattgggacttacctcaggcgctggaagacgaaggtggttggaccaaccgggctaccgcgtttgcgtttgccgattatgcgcgtgtcgtgggcgaggcgctaggagatcgtgtggctatctggacgacccttaacgaaccgtggtgtagcgcctatttaggttatggcgcaggtgcacatgctccgggacgttcggacggcgctgccgcattagccgccgtccatcatttaaacttggcacacggcctggcggtgcagcagttgcgcgaagtgactactaacgatccgcaatacagcgttactcttaatttccatgtcctgcgtggagaaggcgatggtgcggaagaagctgtacgccgtatcgatgcgctggccaatcgtgccttcaccgagccgttgctgcgcggacaatacccacaggatctgcttgccgataccgcatctgtgactgattggagctttgtcgaagacggtgatctcgccctgattcatcagccattagacctgctgggtgtgaattactatgccactacgactgtgcgtttatgggatggcaccaccgcacgccagaacaacgatggccataaagatatgggtggatcaccttggcctggaagccctcaggtggaattcgtagcccaggaaggtccgcatacggctatgggctggaatattgacccggatggtctggaagaactgctactggatttacacgctagatttcccgaccagccgctggtgattacggaaaacggcgcggcttttgaagaccacgtagtgacccgctcagatggcagccatgccgttcacgacccagagcgggtagactatctgcatcgccactttgttgcggcacatcgttcattgactgcaggcgtggacctacgcggttattttgtgtggtccttaatggacaacttcgaatggggatacggatattccaaacgcttcggcattgtgcacgtggattacgagacgcaacgtcgtaccctcaaagattcagccctttggtatcgcgaattggcaaccaccggttcaatccctacgccgggtgcaggagaatga

SEQ ID NO: 509 - DNA, 2643 bp, Artificial Sequence
  6xHis UPI000A250F78
atgcatcatcatcatcaccacgagaacctgtacttccagggtagcatggcgtttagcgccaagccttttattgcgattcatgatcgcagcttccttgatgccagcccgcaagacgttgtgagtagcctgactctgaaagaaaagattacgttgttagcgggctacgacaccttcagcacccctgccattccgcgcctaggtattccgagcatccgcttatctgatggtacaaacggagttcgtggcagctcgttatttaaaatgaccccggctatggccattcctaatgaagcggggcttgcggcgacgttttcgttggaattagttcgtacgatgggaggcctgatcgcacgtgaagcggaagcacgcagcgcctctacggtcttaggtccaaatgtcaacgttcctcgatctccacttggtggccgcaccttcgaaaccttcggagaagatccgacgctgagcggcaaaatggcagcgtcatacattcagggcctccaagatgaagatattggtgcgacgattaaacatttcgtttgcaatgaacaggagcatgaacgtaaagcggtcaatagtgttgtcagccctcgtgccctgcgtgaaatttatctgcgcccgtttcagatcgcgctgtgtgaagccccaccgtgggcccttatgacagcatataataaacttaacggcgtgcactgtagcgaatcgcgtaccctgcttttggatattttacgggcggagtggggttatgaaggactggttatgagcgattggaacggaacctatagcgtgagtggcgcgattaacaatggccttgacctggagatgtgtggccccccaaagtggcgcaatccggaactggtaacgtcagttgtcgcggcgagaaaagttcccattcgcaacctgaatgcccgcgcgctgcaggtagttcgctgggcgcaaaaatgtgcgcgagcccagcctgaattggcatatacgaccaaaccgatcgaatatacccgtgaagaccccggtgactgtgctttaattagacgggcggcggtggaatcgatctgtctcctgaaaaatgatcgtcacatcctgccgtttactgccgcaagcggaatgcgtaaaattgcggtgatcggtcccaacgccaatggtcgcattttttcaggcgggggctctgccaacctgaaggcccagtacgtgatcacccctttacagggcctgagaaattcggccccggccggtgttgatattcagtatgcgttgggcgggaccggtgcagtgttccttcctctgttacatgaagaggtagcagatcacaccggcactccacactatacggttgatttttataatcagaccgccacgggacaaatcgatgcacagccgaatggaacaatcacgcacgatgagtcaaactttcttatgattgattctttgccgagtggtgttaccgcggatttcgtagcgataggccgcgcaagctttaagaccaatgaaggcggaacctggatttttggtctgagttgcgccggcaagggccgattgtacctggacgataccctggtggtgtccaactgggagaatcagacaagaggttcttctttctttggctccggctcggccgaagagatgggcatgtacactgtggacgcgggccgcgtttaccagctgcgctttgagtttaacagccgccggagcgcgatgcgcggtgcggatgagagccaaccgctgaccttcactgggattcgtattggcggcatgttgcatcggtcggtcgacgaacggctgcaagacgcgatcactcttgcgaaaaacagcgatgccgtgatcttagtcgcaggtaataaccatgacgcggaaacggaggggttcgatcgccctacgctgtcgatgccgggtctgaatgaccgcctcatcagtgaaattgctgcagttaactcaaatgtggtcgttgcggtacaagccggtgcgccggtaaccatgccgtggatcgacaaagttccggcagtgctgtttacctggtacggcgggagcgaaaccggtaatgccatcggtgatgttatcttcggacgcgagtcaccgagcggacgcttaccgattacgtttccggcgaacgaacgcgatgtgccagcggctcttagcttcaagtctgaaatgggtactgcccgctacacagaagacctgtttgtcggctataagcattactacgcacgcggtattgcacctctgttcgcatttggtcatgggctgagctacagtaccttcgactatagtgacctgcgcgttagcgtgaaaaacgataaaaccccagcggacttacaggtcgtagtgtcgtgccgcgtgacgaatacgggcagcgtaaaaggcagccattctgtgcacttttatgtatctcacccggttgccacaacgactagtgttatccaccctaaatggagcttgcaaacgtgggcgaaagtgaccgatttgcctccgcaggagtcggaagaagtaacggtggaactcgacaaatacgcgttttcacactggagcgagatggataacgtgtgggtcattgaacctgggctttggaccatagagatccgtcatacggcagaactatctgccgacatttctggacaggtgaccctgcccgaactggaatggtctggactgtga

SEQ ID NO: 510 - DNA, 2268 bp, Artificial Sequence
  6xHis UPI000C0221F1
atgcatcaccatcaccatcatgaaaatctgtattttcagggttcaatgatgcgtattgatgatctcatcgcgcaaatgaccctggaagaaaaaattggtcagctgaacttagccaccccgggcggcgaaactctgacaggcgcggtggccaatcaggatgtcgcgcgcaaagtcctggagggtagcattggctccatttttggcgtgaaaagtctggctactatgcgcgcgtttcaggatttagctatgcgtacccgtctgaaaattcctctgatgttcgcggaggatgttatccacggttatcgtacagtttttcccgtgccgttaggactggcagcaagctttgacatggatctggttgaaaaaacagcccgtgtagccgcagttgaagcggcagttatgggtatcgaccagacctatgcccctatgattgatattggccgtgatccgcgatggggccgtgtcgccgaatgccctggcgaagatccctatcttgcagcgcgtttagcggaagcgcaagtgcgcggctttcaaggtaacgatctgacgtccccggacgcggtgatggcatgtcttaaacactttgtcggttacggcgcagctgaggggggccgcgattacgattcagcagacatgtcgcctgcgcgtttgcacgacgtgtacctcgccagctttaaggcaggggttgcagcgggcgcgggctccgtgatggccgcgtttaataccctgaatggtattccgatgcacgccaaccgcactcttattcgtgatgtcctgcagaaaggatatggttttgatggcctggtggtcgccgactacacaggtattatggaactggttccgcacggtgttgcagaagatttggccgcagcagcggtgcttggaatcgaggccggggtagactttgatatggtgtctgaagcctatgtgagccatcttgcggatgcggtagcagaggaacggatcgacgtggcgctgattgacgaagcgtgtcgtcgtgtactggaggcgaaagaaaagctgggactattcgacgatccgtaccgacgcatggcgggcgatcctgataaagtgcttctggcgcccggtcatcgtgaactggcacgccgagccgtggcggaaagctgtgtgctgctgcagaatgaagctgccgtgctgcctcttgccgaaggctcacgtatcgcccttataggtccgctggctgacgatttagtgaacatgaatggaacatgggccgttagcggactggctaaagatgccgttactgtgcgttcagccatggaagcacgatgcgacctctcattcgcccgcggtaccaatattacagacgatcctgctctcgccgatcgcctgaacgtgcacgatcggggcaccccgtccgcgagcattgatcagcgcagcccgaaggagctaattgcggaagcaaccgccgtcgcagcgaaggcggatgcaatcgtagcagtactcggcgaaagcaaagaatactcgggtgagtcatcaagccgagtggatttacgtctctccgccggacagattgccttactgaaagcgctgcgttccttaggcaaacctctggtagcggtggttctgacgggccgtcctttagtactgacggatgttgccgatttgtgcgatgccctgctgattggatggttcggtggcactgaaacaggcaacggcctggccgatgttctcttcggcacagccgatccgggaggccgcctgccggcgacgtttccgtgggcagagggtcaagtaccgctgacttatgcccatctcccaaccggccgcccgttcacgggcaaatttgagaaatttcgtacaggctatctcgatatcccggatggccagccgcacaacgacggtctgtttggtttcggtgcgggactgagttatacaacctttgacttcacccacccggcagtcgagcggagcgcgctgaaatcaaccgaagatcgtctgcgtgtaagcgtcgaagtcgaaaataccggggcgcgttcgggttctaccgtggtgcagttgtatgtgtctgatccggttgcgagtcgcagtcgcccggtacgagagttgaaaggcttcgaaaaagttcgtttggaaccgcacactcgtactacggtgcactttgaattatcagccgacgatctgtccttttctacagccgaaaccgtgaccgatttgtcgtggaccttcgaaccgggcaagtttattctgtccacgggcccgaatagtcgtgacttacaacatattgacattgattggcaagcgtga

SEQ ID NO: 511 - DNA, 1428 bp, Artificial Sequence
  6xHis UPI000CEB5AB1
atgcatcatcatcaccaccacgaaaacctgtattttcagggcagcatggtcgcgtcagagagcccgggcacgattcgtgagtcgtttccagatgatttcgtgtttggtgtggcgaccagcagctggcagattgagggaagcagctccactcgaagcgaatcgatttgggataggtttgccaaaattccgggcgcgattgttgatggttctactggtgatccggcgtgcgaccacctgaaccgtgtagatgaagatcttgcgctgatcagtgaattaggcgttggtgcctatcgtttttcagtgagttggccgcgctttatgcctggtgggaccggcaccgtcgcgcattcaggggcgggattttatgatcgcctgattgatagccttctggaacgtggcgtgcaaccgcttctgaccgcataccattgggaccttcctcaatcactgcaggatgaaggcggctggttacacccggatatgcctcgctggtttgcagattactgccatgcgttgggcgaacgttatggcgaccgtgtatcgcacatggccaccctgaacgaaccttgggtgagtgcatttcttggttacgcagccggcattcatgcaccgggcgtcgtaaatagcacgcaggcacttgaagttgcgtatcgtcttatggttgcctcgggtcatgggatcggtgcattaacagatgcgggtgtatctaatccgggcattgtgctgaatctgacgaccgttcgcgtggatcaacccggcgcggagaaagcccgtgatcacatcgatcgcttacaaaacacgcttttcacagacctgctggcgggccgtggcattagcgatgaagtgcgtgataccaccgatattctgacggattggagctttgtaacggatgagggtctggaagcggcggcgaccccgatctcatggctgggtgttaattattacactccaattcgtgtggggctcccgcgtgacactgaccaagcaaccggtgtgggtcaggatactgttgtctatccagcatgtccgcctgctagccttcgccctcgtggcccgttaaccacgatgggatgggaagttgacccgcaaggcctgcgggacactcttgttgaaaccgcggcagccttgcctggcgttcctctttgggtgacggaaaatggcgccgcctatgcggatcgtgttatcgatggcgatgtttacgatcccgaccgtatttcttatttgaccggccaccttggtgcggctgcagaagcgatttctgatggtgtgccgctgcagggttactgcgcttggtcgctcctcgataatctggagtgggcagagggaaggacacagacatttggactggtctacgtccatccagaaagcatggaacgcattccgaaggcctcatatcacttttacgcagatgtagcgaaaggggaacgctga

SEQ ID NO: 512 - DNA, 2541 bp, Artificial Sequence
  6xHis UPI000D5B9C38
atgcatcaccaccatcatcacgaaaatctgtacttccagggaagcatgccgagccatgaagatgtagatattgaacagttactgactcagctgacgctggatgaaaaaatcagcttattagcaggggccaatgtgtgggagaccgtaccgatcgaacgacttaatatcccgtcacttcgtgtgaccgatggccctaatggagcccgtggatcacaattcttcgatggtaccaccgcagcttgtttcccggcctgtgtgtctattgcggccactttcgacagagcgttgaccaaacgcattggcaaagccctgggacaggaaagccagaccaagggcgcctacgtactgctgggtccgaccgtatgtagccatcgcagcccgcttggtggtcgcaattttgaagccttttcggaagatcccattttgtcaggcattcttgcggcggagtatgtgaccggcctgcagtcagaacgagtaggagccacaattaagcattttctgggcaatgaacaagatactcgtcgttttagtgtcaacgaactaatctccgaacgggccctgcgtgaaatttacctgcgtcccttcgaaattgttgtgaaaacatcggatccgtggtgcctaatgaccagttacccgaaaattaatggcgcccatgtggatacgagtcaagaatttctgcaacgcatactgcgccaggaatggggttacagtggccttgttatgagtgattggggcgccaccacgtctaccgtagagagccttacggcgagtctggatctggaaatgccgggcaaaagcaagtggcgtgcaagtgaacaagtcaaaccagccattgaagccggtcttgtgagcgaatctactatcaacgagcgcgcgcatgcggtgctgcaactgttaaaaaaaaccggcaagtttggcgatcgtcgtgctgatattccggaaacagcccaggacctgcccgaacatcgtgatttaatccgtcaggcaggtgcggaaggaattgttctgctgaaaaatgaaggcatcctgccgctgaagaaaggccagcatcgcaaagtggctctgttgggaccgttagcgaaatatgcagccgcacatggtgggggctcagcgagcttgaattgtcactacaaggttagcccgtttgatgccttctcatcacacttgggctcggatgtggacgtgacctattccaagggagcacacatctttcgcgtatatccggacatggaagaaggctgtaaaaatagcgtgggaaatcccggctttaccgcgaaatactggaaaaactcagcctttgaaggtgaaccgttccacacgacccatttcccgcgtggttcctttactaccttgatggacaccgaagtcgaaggcaagttaggcgtacgttttaccacgacctacacgccgagcaagtcgagcattccgtacctgagttttagcacgatcggcccgagcaaactgtatatcgatgacgtcctactgttcgagcaaccaaaagcgactaaagactcaatgtctttcctcctcggtgtgcaggatgaacttcagagccagtatcagttcgaagcaggaaaaagctatcagatccgtattgatacgatcccgtcgccggagccgaatggcgaactctatttactggatggccaaattgcggcgcacctcggcttcatttcacaagaagaaatggagttggatgtcctgagtgaggcgacaatgcttgcaaaggaagcggatgttgccatcgtcttcgtgggtaataacgcgcaatgggaaactgagggtcaagatatggatgatatgaatctgcctgcaaacggcagtcaggatcgtctgattgcagcagtagccgccgcgaatccgtgcacaattgtagttaacaccaccggtgtagcttacgctggccaagagagtcgcaatgcgattttcaatgtgctgtttggtgaggttaacccgagcggcaaactgccgataagctggccgaaagaatacgaacatatcgcggtttacggtaacttcggcatggatagctatgaatcgcgtcaggtgaaatacgttgagggagtgttcgtagggtatcgtcattttgatcgcatgtggggcacggagaaagaagtgcgttggccgtttggttttgggttgagttacacaacatttgaagtcacgaatgcggcgattgaagggaacttcgaaaaacccaaaggcaacggagtgacggtgacagcggatgtagtaaacacgggcaaggtagctggtagcgagattgtgcaagtatacattttgcctccgtctagtggtagtgcggatcacccggtaaaaggtctggtcggctttgagaaatttcgtatcgaagtgggcgaaaaacaacgcgtctcaattagcgctggcgcacagcaggccgcatattggcacgtggagagccgtaaatggaaagtggaagcgggcgagtacattctgtggctgtcaacctctagcagccctcgcgacaaaaaagcagaactgtctgtaaaagtggggaaagatttctggattgacccgtga

SEQ ID NO: 513 - DNA, 2616 bp, Artificial Sequence
  6xHis UPI000D779558
atgcaccatcaccatcatcacgaaaacctgtactttcaaggtagcatgttaaatcctacggagaaattatttgttctggattatttcaagaataatcgcaaaccgtttgggctgccttggagcgcgtacacgccgtttttccctcagggattccgctttccgggctatagcgattcacgtttcgtcatcaacgttttcacgtgttgccgctacacccatacctctcgcgattggcaatctgcggtaagcaaagcccagtctatcgtgtctcagctgacgttgccggagaaagcgaatttgaccggcgggataggtagcgttggccgttgtgagggcacgctgggacgtgttgaccgatttggtattccagagctctgctttcaggatggtccaactggcgtccgcgcctcagactttgttagcgtattccctgcgggtctgaccaccggcgcaacgtttaaccgcgatttgatggaaaagcgtggggaagtgatggctgcagagtttaaaggaaaaggaataaacgtcttgctgggtcctgttaccggcggccctcttggtcgtagcgtatatcagggccgcaattgggaggggtttgggatggaccccttcctcgtgggggaagcagcctacgcaaccgtgaagggaatccaaagccagggcgtgatagccacaagcaaacattttctcacgtacgaacaggaaacattccgacagttgtacgcagcggatgatcaattcaccctgaatccgattaataacacagtgaatacatacagcagcgatgttagtgatcgtacgttgcacgagttatacctgaaaccttttatgaacgcggtgcgggccggaaccggagctatcatgtgtgtgtataatcagattaacgggacacaaggctgcgaaaacgataaagtccttaacgaaatcttaaaacaggaattaaactttcagggtttcgtcgtgtccgactggagtgcggtctttaatgcaagttcggcgcacaacgcgggtgtcgatgtgaccatgccaggtggggcaacgggagggggttataaaaacctggtcacggggcaagccgtgattgatgccgttaacgacggcaaaattcccattaaacgcctcaacaacgcagtggaacgtttcctgactcagtactactactacggccaggatcaaggctatcccaaagtcagctataaagacgggtaccaggggacttacctgaatggatcgattgtaaatgaacacgtcaatgtccagaccgatgactcccgcaacaccgcgaaacaaattagtgaagaggcaattaccttaattttcaaccaccgcaaagaaaatgactacggtccgcagggttacatcccgagccgtaaagatgttaaaggcacaggtctgccgctgtcaaaaaaagcccgtattgcggtgtttggcgatgacgctggccccaatcctatgggtatcaatggttgccaactttggatcggacctggcagcaatttgtgcccgggtaattcgactaataacggcactaacgctatgggctggggcagcggagccggctattttccgtatctgattgatcctctgcaggggctgacggacctgactcgtgaatatggctctgcactgcagagcaacttaatcgatacagatctggatggccaaaacggtaagctgattgaacagtttgcaggccaagcggatgcctcactggtatttgtgcaggcgcgatctggcgaagatagcgataggacagacctggagttagaatcgaatggcaacgctttaatccaaaaggtcgcctcatcgagcaacaacaccatagtcgttgtgcacactgtgggtccggtgtacatggacgattggtttaaccatcctaacgtgaccgccctggtatttccgcaccttccgggccaggaatcaggcaataccctggccgatatgctttatggcaatgtggtaccgtcgggtaaaatgccgtacagcatcctgagccgcaatgattcgtccacttacgtcccggtggtacgcgaaatgaatagcaataaccagatccctgtgccatttgacgaaggtgtttttatcgactaccgctactacgataagaagaatgtgaccccgctgatccactttggccacggaattagttacaccacctttcaacactccaaccagctgaaggcccaagcggtcaccgataattccgcctaccctactgaagttccacagaatacctcagtcggtggcgaaagttcactttggaactacgtggtcagcctgagtaccagcgtgaaaaataccggcagttctattagtgggaaagaagtgtcccagttatacatcggctttccgcagagtgataacctgccggacattccggttcgccagcttgtggggtttaagaaagtaggcagtattaaaccgaatcagagccagaatgtgcagttcaaaatcactcgccgcgatatgagctactggaacgtagaacagcagaaatttgtcatgccagacggcgattttacgttttggagcggcgcaagctccgacgtggatacgttaaaaggaaaggtgaccgttaccattaaaaatggtaaagtgagcagcactaaaagctga

SEQ ID NO: 514 - DNA, 2085 bp, Artificial Sequence
  6xHis UPI000DC42E3D
atgcatcatcaccatcaccatgagaacctgtactttcaaggctctatggcagagagtccggaatcccagatgtccgatagtattttcgataagtttcgtgaaggtaccaatgttatatcatcccgcaataccgtcgcaacgccggattcggaaatttcaccacctgaaagtcctctggaaaaacatgctatctttgatccacgcaccaaatcacggcagttagccaaaaccttgtccctggaagaacaggtaagcctgcttgtcgctgcggatttctggcgctcgaagagtatcccgagtaagggtatcccagcatttaaaacgagcgatggacctaatggggcccgcggcgccatcttcaaagctgggaccaaagcggctctgttcccatgtgggattagcctagcggcgacgtggaataccgaactgatttacgaggtggggcaacaccttgccgacgaaacgaaagcccgcgccgctcaagtactgctggcgccgaccgtatgtctgcatcgtgcaccgttgggtggccgtaactttgaatctttttctgaagacccattcctgacgggcaaactggcaattgcgtacattaagggactgcaggaaagaggtgttgcggccaccataaaacactttgtggcgaacgaacaggagacttttcgactgacgattgactcggtggtgcaggaacgtcatctgcgcgaactatatttacgccctttcgaaatggccatccgcgaggccaacccatgggcggtgatgtcgtcatacaacctgattaacggcgttcacgcggattgcaacttccatacgcttcgtgaaatcctgcgaggagaatggaactacgacggcctggttatgagcgattggggtggcaccaattctatcgtagaaagtattgaggccgggtgcgatattgagatgccggttagtacaaaatggcgtggcgagaaggccatcaaagcgattgaaaatggtaaactgtcgcgtgaggcggtagaaaacgccgccgccaatgtgctgtacctggctgagagaaccaaaggtagcgatatgacccctgaatccccggaagcagaggatgatcgcgaagagactcgtaaactgatccggcaagccggtgtggagggcattaccttacttaaaaatgaaaacaacgcgctgccgattaaatcgtcgcaggccaaaatcgcagtcattggcccgaacgcaaatcgtgctatcgcgggtggcggtgacgtagcgatcgttattgttgggctggatgcggaatgggaaagcgaaggctatgatcgccagactatggacctgccgtcggatggtagtcaagatcgtctgattgatgcagtcgtggaagccaatccgaacaccattgttgttaaccagtcgggctcgccggtgaccatgccttgggtcaaaaaagttccggcgatcctacaagcgtggtatcagggccaggaagccggaaacgcacttgcagacgtattgttcggtctggagaatccgagcggcaagttaccaaccactttcccggtgcgtttatctgacaaccccacctatcatacctggcctggcgaaaacttacgatcaatttatggcgaaggcctctacatcggctatcgtcattatgatcatctgtctctcccgccgctgtttccgttcggacacggcttatcgtacaccacctttagctattccccgcctaccctctcaagctcgattttgtcttcggagtcgccgaactcgaatatcacgctttcactggaaattaagaacaccggtagcatgaagggcaaagaaattgtgcagctttacattcacgatgtcaaatcccgtctggtacgtcctgaaaaggaacttaagggttttgccaaagtctcattagaggtaggagagagcaaagttgttcatattgatattgacaaatactcagttggctattgggacgacagctaccgtgaaggcaaaggcatgtgggtcgcggaagaaggtgaatttaaagtgctagtgggcggctcagcagcggatatacgtcacgcgatctcattcgagatcaaaggcacctttacctggattttctga

SEQ ID NO: 515 - DNA, 1668 bp, Artificial Sequence
  6xHis UPI000F3E476C
atgcatcatcatcaccaccacgaaaacctgtacttccagggaagcatgaacggcattctcaaaggggaactgaattttcaaggttttgtggtttccgattgggttgcgcagcactctggtatcgaaagcgctaatgctggtctggacatggcaatgccgacttcgcaatattggaacgaaaggcagctggaagaagcagccaacacgggtgccttgaatcaaacccgtctgaccgatatggcgacccgtattctggctagctggttccagtttggccaggaccaggcgttaccccttggctctgggatgccgccgaacctactgctgcgtcatgattacaccgaagccaagagtccggaaagcaaggcatcgcttatgcaacaagccattgaagcgcatgtgatggtgaaaaactccaacgggaccttaccgctgaaaaagccgaaagtactctccatcttcggctacgatgcgatctcgcagaacacgtttgtgcctgattctcgcctgttcccgcagagctgggaagcgatcggtcttggcatgcctcagctggagggtatctcctcgaactcaccggttccggatgctccgatgctgcataatggaactctcattgtaggcggtggctcaggcagcaatacgccgccgtacattagcagcccttttgaagcgttgaaggcccgtgcctacgacgatgacacggcaattttttttgatttcgtgagcaccgatccaccggttgtggcgagcagcgaggcgtgtttggtgtttattaacgaatatagcagcgaagtgtgggatcgtccgggtattgcggacccggagtcggatgaacttgtgcagaacgtagcggcctcttgtaacaataccatcgttgtgatccataacgcagggattcgtctggttgatgaatggatcgacaaccctaacgtcaccgcagtaatctttgcccatctgccgggccaggatgcgggccgcgcgattgctaaaattttgtacggtgatgtcagtccgagtggtcgcctgccgtataccgttgcgaaaaaagcctcagattacgggcatctgctggacccttgcgaagcgaatggtagcgaaagcccgcaatgcgattttaccgagggggtgaatattgattatcgctctttcctcgcatctaataccaccccgcgctacgaatttggttatggcttaacttactcaagcttccgttactttgcgctgcagatagatgtgaatgcgactgcgactcccaacgataccgcccccgtaccggtctatacaaacggcaccaccaacaacaactcgaatcatagcggcgtcattgtgggcggcttagccttactgttcgagtccgttgggaccatcaaggcgtccatcgagaacactggctatgtggaagcggccgaagtagcacagctttatctgcaaattcctgcgatggcgtctaacgcctccaacccgacgaccaaggtcttacgcggctttcagaaagtaagcattcgtcccggcgaaaccgcagacgtaagtttcaatctgcgtttaaaagacgtgagcagctgggatgtagtgcgacaggcgtgggttatccccagcggcgaatttcaggttaccgtgggcaaaagcgttctggatcagagcctgacgggctcctttagtacgtga

SEQ ID NO: 516 - DNA, 2460 bp, Artificial Sequence
  6xHis UPI00101460D7
atgcatcatcatcatcaccatgaaaacctgtatttccagggttcaatgcctgacgaccccgtagatgtattagatttagataccaaggctcgtctgcttagtggtcaggatatgtggagccttcctgcagtgccccggataggcctccggagcattgtgatgtccgatggccctgttggtgttcgcggagttcgctggacagccgacgatccgagtcttgcattacctagtccgacagcgctggcggccacctgggatcccgcattagcgcgaagggtgggacgccttctggccgcggaagctaggcgcaaaggagtacacgtgctcttagctcccactgtcaacttacaccgtagccctttgggtggacgccattttgaagcgtactcagaagatccctatctgacagcacgtatcggtaccggctatgttcgaggggtgcaggatggtggcgtagctgcggttgtcaaacactttgttgcgaacgatgccgaaaccgaacgctttacggtgaacaataaagtgtctgcgcgtgcgctgcgtgaactctatctggccccatttgaagccattgttaaagacgcacgaccttggggtgtaatggccgcgtacaaccaagtaaacggcgtaacgatgacggaacacggacatttacagaacgacgtactgcgcggcgagtggggttttgatggcatcgtggttagcgattggctggcagcccgtgataccgttcgagctgctttaggtgggttagatgtcgcgatgccaggccctgtcaccgtgtacggccctgccctggccgctgcagttagggcaggagacgttccagagtcggttgtggatgatgcagtacggcgagtgctgcgcctggcggatcgtgtgggcgcgctgggcgaagccacgcgtgcacgtccatctgcccctgatggccgtgccctggcgcgagaagttgctgcccgtagtttcgtgctggttcgtaacgctcccgtccgtggggcaccggcgttgccactcgatccggctccaggtctacgcgttgccttgttaggtggcgcagcgcgtgatgcgcgtattctcggaggcggtagcgcgcaagtctttcctgcccgagttgtgtcgcctttagatggtttacgcgcggcgctgcctgaaggagcagttacctatgccgtaggtgcagaaccgggcgatgaattgctgccagctggtgccggcttcaccctgcgtgcggtttgccgcgacgcagccggacgaatgctaggcgaagaacgtatgccctcgggtatggtgcagtggttgggcgatttacccgcaggcgttggttatgaggcactccgcaccgttgaactgacgggcactttcaccccgcgtgaaagcggcccgcatgtgtttggcactaagggtgttggcgcttttcgcttggtcgtgggcggtcgcaccttattcgacggagaacaaggcgctgaccacgccgatcctttcgaagcttttctgggcagccccgtagaacgcgggcgtgttgtcttagccgcggggacggcagtggaagtttctctgacctgtgtggtagcggaaccggatggcgctccgattgaggctgtgggtttttgcttgcttcatcgcgagccggaacgtgatgctgaggaactgctggcagaggcggttgcggttgcagcctccgcagatgccgcagttgtcgtggttgcaacgacggaacgtgtggaatcagaaggttttgatcgcaccaccctcgcactaccgggtcgccaggacgagctagttgcccgggtagccgccgtaagtccgcgtacggttgtagttgtgaattcaggctcaccagtagaactgccgtggcgcgatgatgttgccgccgttctgctgggctggttcccgggccaagaagcgggcggtgctttggccgacgtgctactaggtggctgtgaacctggcggtcgtctacccactacttggccagttcgcttagcagacgcacccgtgactcgcgtggcgccggtcggcggggagctggcatacgcagaaggtctgtttataggctaccgagcatgggagaaggcgcgggctaccccggcatatgcatttggccacggattaggttataccgattggtcatacgaaacgcttgatatgggcggcacgggaaccgcgcgcgtacgtgtgcgcaataccggctctcgtcccggccgtgaggtggtacaagtttatcttgcagtaccaccgggcgaccgagcgggacgcccggtaagacgccttgctggattcgcttcagtggaagccggaccaggagaaacggtcgaggccgtcgtagcgttggatccccgtgcgtttgaagtgtgggatgacgaagcggcaggctggcgccgtattccaggcacttataccgccgaggcgggtcgctctatcgcggatagacgattgactgccccggtcgaagtggcgtga

SEQ ID NO: 517 - DNA, 1608 bp, Artificial Sequence
  6xHis UPI001139C6A8
atgcatcatcaccatcaccacgagaatctgtatttccagggttcaatgcacgaactgtacctgtggccgttctatgatgccgtgaaagccggagcgggtagtacgatgtgcagctatcagcgtgtgaataactcttacggctgccaaaacagcaaaacgatgaacggtctgctcaaaacggaactgggattcgaaggcttcgttgtgtcggactggtacgcccaacatactggagtagcgtcggtgaacgccggcctcgatatggtaatgccgaatagcatgtatctggacgtgaattcctttgcgaccgcaattaaaaatggttcgatcaactcaacccgtctggacgatatggccacgcgcattttagcgacctggtatcgtttcgccaatctgcaaaacccgggactgaatgatgcggaagcgcgccaagcagccgctgaagcaacactcttccaaggggctgtagaaggtcacgtgctggtgaaaaacgtaaacaatgccctccccttaaaaaaaccgacggtcctgtccctgtttggctacgatgccccgggtggcatcaacatttcggccaccagcttccagttgaaacctaacggtaaactgaacacacaagcgtacacaaatggcaagccgtatactgatctcgacgatctcattaattcagcacaggttctgccggcgggatttgccggcccagaagttgcgttaaatgggaccttatataccggcggcggctcgggtgcgattactcctgtgagttcgatttcaccggaagatgcctttcgcaatcaagcggcaattgatgggaccactctgtacaccgattttacgagccagaacccgacgattaaagatccgaacaacccgtgcttagtgttcataaacagccagagtagtgaaacgtgggatcgctcgacccttgcggacatttattcagataccctggtgactaatgtcgcgagcaaatgcaaaaacacaatggtgataatccactcagcgggtattaggctcgttgatcgctggatcgaccatccgaatatcaccgcagtgatttacgcaaatctgcctgggcagtatagcggtacctcactgacggaaattatttatggccgccagtctccgagtgggcgccttccctttacccaaaacgttaccccgcgcttcgcatttggttacggcctgacctacagcaatttctcttactccgggctgcagatgagtgcgaatgatagtgctgttacgtctagctccccaccgggcactgttggcgggatagcagcagaaggaggcacgaccagtctgcatgatattatcgccacggtgtcggtatcagtccgcaatacgggtaatgtggcagcggcggaagtagcgcagctctacctgggcattccgggtagcggtgtgccgaaagtgcttcgcggatttgagaaacagctgattcagccgggtgcttcagttaacatgaccttttcgttgcgtcgccgcgatatgagtatttgggatgtggtacggcaacagtgggtactgccgtcaggcgcatttaatattatggtggggaagtctgtactggacattcaattgcagggaacgctgacgctgtga

SEQ ID NO: 518 - DNA, 2403 bp, Artificial Sequence
  6xHis UPI0000EA5CFF
atgcatcaccaccaccatcatgagaacttatattttcaaggcagcatgaccctggctgaaaaagtgaacttaaccacgggtacgggtatatttatgggcccgtgtgcaggtcagactggctctgccttgcgcttcggcattccttcgctctgtttacatgattctcctttaggtgtgcgtaacagtgatcataatacggcatttccggcgggcattaccgttggcgcgacattcgataaggacctcatgtacgaacggggtgtcggcatgggcgaggagttccgcggcaaaggcgtcaatgtattacttggtccatcggtgggcccgatgggacgtaaaccacgaggcggccgcaattgggaaggtttcggcgcagatccgagtctgcaagcgattggaggagcccaaaccatcaagggcatccagagtcgcggagtcattgccaccattaaacattatattgccaacgaacaggaaatgcatcgtatgagctctatcgtaaccaagggctacagctcgaatattgatgaccgcacccttcatgaactgtacctgtggccctttgcagaaggcgtacgcgccggtgtagggagcgtgatggctgcctacaatgatgttaacagttcagcatgcagtcagaacagcaagctgctaaatgaaatcctgaaagatgaactggggttccagggctttgtgatgactgattggctgggacagtatgggggcgttagcagtgccctggccggtcttgatatggccatgcctggtgacggtgccgtccccctttttggcgatgcatactggggctacgaactaagccgttcggtgcttaacggtagcgtgccggtaagccgcctgaatgatatggtgacgcgtatcgttgcgacctggtacaaattcggccaggacaaaaactatccacttcccaacttttcgatgaacacccaagatgcgaaaggtccgctgtaccccggcgcgcttttttcacccagcggtgtggtcaaccaatatgtcgacgtccagggagatcaccatgttaccgcgcgtgcgattgcccgtgatgccatcaccttattaaagaacgaagataacatcctgccgctacaaggtaatgattcattaaaagtttttgggtcagatgttggcggtaaccctggtggcctgaactcatgcaacgatcaggggtgcaacaaaggggttcttacgatgggttgggggtccggcaccagtagactgccttatttagtaaccccacaggatgcaattgcgaatatttcaagcgccaccgagttctatattaccgataacttcccgagcacggtttccgagaattacattactgtggagggtaatcccggggatcgtaccacggcgggcctgaaagcgtggcataacggtgatgatctggttaaagaagcagccgcaaaattttctcaggtagttgttgtggtgcatacagtgggtcctctgattatggaggagtggattgacctgcctagtgttaaagccgtgttagtcgcgcacttacccggtcaggaagcgggtaatagtctgactgacattctattcggcgcttattccccatcaggtcatctcccttataccattccaagcagtgagagcgactatccgagcagtgttgatttaattagccaaccctttggtcaaatccaagatacttacacggagggtctgtatattgactaccgacactttatcaaggctaatatccgaccacgctatccttttggccacggcctgagctataccaccttttcattctccctcccgactgttaccccaggcacggcgctagaaagcgcctacccgccgactcgcccaagcaaaggtaccacgccgacgtatgcaaacaccgccccggatccttcagaagttgcctggcctaaacactttgaccgcatttggcgctatttatacccttatttgaacaaccccgaaggtgcggcgaagaatagtagcagcaaatatccttatccggatggttacaccaccgaacctaaaccagcgccgcgcgcaggcggtgcagagggtggtaatccagccctttgggatgttgcctttactgtaagcgtgaccgtaaccaacaccggtaaacgtcctggtcgcgcagttgctcagttgtatgcggaactgcccgaaagcctgggtgttgaaacgccttcacgtcaactgcgtcagttcggaaaaacaaaaacacttgccccgggcgcttcagaaaccttgcgtttaggcatcacgcgcaaggatctgtccgtttgggataccgttgtccaagattggaaggcacccgtgaacggcgaaggtgtgaagatctggatcggcgaaagtgtgctggatatgcacgggatgtgtgagatgggcggtggttgtaccgcgatttga

SEQ ID NO: 519 - DNA, 1548 bp, Artificial Sequence
  6xHis UPI0001523037
atgcaccaccaccatcatcatgaaaatctatattttcagggttcaatgaccccacgtgataccgcccccgatcgtcctacccctaccgagttagcaggacttctcgctggtggaagccgcattggtgtatcgacttcagcgaccaaggttgaaggccgcgctcatgagggtggccgtactgaaagcgtatgggatgcctttgcgcgtcggccaggcgcagtagcggatggctcagaccctgaacgtggcgcaagacacatggaacgttatcgtgaggatgttgcgcttgcgacggaactgggtgttgacgtgttaagtttctcactgagctggagccggattcaaccggaagcccgtggtggtcttcgtcgtgaaggcattgccttttatgatgaacttgttgatgccctgctggcggcaggcattcgccctcgtgccgcactgcatgatcacgaccttccggtagaattacaagatcgtggtggctggttgcatcgcgatacagcgctccgctttggggatctcgcgtatttagcggcagaagctttagcagatcgtgtacctgattgggtgactctgcgaactcctgcactgaccacaatgggtggccatgttaccggtacacatgcgccggggagccgtcttggactggatgcccttcctacggtacatcaccagttgctggcgcatggcctcgcagtggaagcgattaggggctcacgttccgcagcccgtgtgggaatcgtcaacgcacatcgtatcgttgaagcagcttcagcggacgacgatgatagggcggcagcacttgtggcccgtgcgcttcatcaggacctgtttgcggatgcggttctgctgggacgttatccggatctgacgggtccacatgcagaagcctttgaacgccttggcagggttgaccctgcggatcttcgcgttattggtcaaccgcttgatcattatggtgttgcccttgcagatcctattcgtgttgcagcggttccccgcctggtcgcgggctctacggcaattccgttcacagagctgccgtgggcggatcatccttcaagccttgatggtcatccggtggctcctgatttggtcccggcggtattagccgatcttcgggcacgttacggcgatgcgttaccaccggttgttctaagtggtctggacgccgcccatccggaacaagttgatgaccgtgatggcagccgtcgcgatccacgccgcgcgcatagtatttcagatcacttagttcaggctctggcggccgttgcccctggcggtcaggctgaaggtgttcggattgaagcggtggttgccggtagcctcctagatggctttgaatgggaagcaggacgcgcagcgccgcgtggactggtgcacgtagatccgcgtacgggcgaccgcacgccccgtagcagctatcgtttcttacgagataccttgcgtgaacgcgctgacaccgctgccggtcgccgtccgcagaatggctgtgcaggaccggcgtacccgggttcatcacctggtccgcgtgtggggagctga

SEQ ID NO: 520 - DNA, 2568 bp, Artificial Sequence
  6xHis UPI0001831CF5
atgcaccatcatcatcaccatgaaaacctttatttccagggtagcatggatagcgaaagcgtcaccaagattattacccagttgaccctggccgaaaaagtaaccttactgagcggcattggtgcctgtcagacaaactcaaacgaccggctgaacataccttccctgcacaccagcgatggtccgcatggactccgtggaggtggcggccgtttcttcaaccccccaccaggttatcagttgccaagcgcaaccgcaatgggagccacatttgacactgatctcttataccaagtgggcaagctgctgggcgatgaaggtagacgtaaaaacgttcaggtcgctctggcgcctactgtttgtattcagcgcagtccgctggttggtcgtggctttgaagcgtttggtgaagatccggtactgtccggttcacttgcagcccagtatgtacgcggcctccaggaacggggtgtggcgtcatgcattaaacactacgcggcgcacgaccagtcttccaaaagtaaagaagatgatgttcacatgactgagcgcagcctgcgcgaagtccatctgcttccgttccagattgctatgcaagctcgcccgtggagcgttatgagcgcgtatcagaaaattaacggtctgcacgtctcggaagatcccctgctgcttcgtcagattctacgtaaagagtggggcttcgacggtcttgtaatttcggattggtggggcacgtacagcacgagcgaagccatcaacgcaggtttagatctagagatgccgggccctagcatttggagggggcgccagctgattgaagccgtggaatgtcgtaaagtgagcatggccgccatcgataccgcagttgaaaatctgttaaaactcatcgaccgcactaattcgtcgcggacccgcacatcagaagttgagggaggtgataccccggatagtcgcgcgctgacacgtaaggtagccgctgattcaatcgttcttctgaaaaacaccaaaaacgtgctgccgttgccagcggtcggtaaagccagcaccacctacggactgattggcgaacattttaaaaacccggccactggtggtggcggctccagtgaaaccacgccgttctacgtttctcgtccccttgatgcttttgcggaagtcctgagtgcggaaaatattcgtcatgagagtggctgttacacccgccgatggagcccgttgatccatgaaggtttgtatcagccggacagcgaagagcccggcctcttgttggaatggttcggggtagacccatccattttcaccgaagtaccgtgcctgtacagtacgactaccactaatacgtgcatgtacttctcccagattacatttcctaatgtgccagatctgcactatattcgcgtacgaactacgttcgtggcggaaaccacctgtaagtatagactgggactcggcgtgtgtggcaaagggcgcctgtttattgacggtaaggaagctatcgacttgtggaccaatcacccggaaaaaacagacgataccccatgttttaacaaactttcgatggaacgctttgcgacactcgacatcgtggaaggtcagcgctatgaactgctcatcttgatgactaatgaaaaaccgggagacaactttggtccgccagccgcaggcggcgtgcgcctgggaggacaagttgttcgtgacgaatctaaggcaattgaagacgcggtgcaattagccagaaccgttgatgtgcctattctgatcacgggcttatcgaccgattgcgaatatgaagcatcagatcgtacctcactgctgctccccggccgtgaaaacgagatgattcagaaggtgtcggatgctaatccgaacaccgttgtgatcattcaggccggtatgccgattgaaatgccgtggattgacagcgtcaacaccttagtatatgcatggtatggtggacaggaaaccggccacgcgatcaccgatgttctctggggtgccgtgaacccttcgggccgcctgagtctgtcatttccgcgccgcattcaagacaatccggcctttctgaacttcggcaaaaccgatcgtgagattgtgtatggcgaaggcgtattcgtaggctacagatattacgagaaacttgaaaccccaccgctgttttattttggctacggtctgagttatagccagttcaattactctgatctgcgcgtaccgagcgaatacccgaaagatggtcagatgggtattgcactggacgttacgaacgccggtgaacacgacggcgctgcagtcgtacagatttatattagtgacctggagtgcagcgtacaacgcccacgtaaagaacttaaagcctttcgcaaggtcttggtgtctaaaggcgaaacccgcacctgccatatcactctggataaatatgcactgtcattctggtccgaagagcatagtcagtggcgcgttgaagctggggaatttgaagttattgtcgcgacctcggccgatccggaagatgaagtgtcacgagcaaaatttcgtcttttgaagacattcatgtggtcaggagtctga

SEQ ID NO: 521 - DNA, 1380 bp, Artificial Sequence
  6xHis UPI000B365547
atgcaccatcatcatcaccatgaaaatctgtacttccagggcagcatgacatttcccgacaatttttactggggcgcggcttcggcagcgtatcaggtcgaaggagcgtacaacgaagatggcaaaggcccgggcatttgggatgcgttgagcgaagggcatgttaaacaccgtgaaaatggcaacgtggcgtgtgaccactaccatcgttacaaagaagatgttgcgttaatgaaagaaatgggcctgaaagcctatcgtttcagtgtcagctggccgcgtattatgccttcagaaggcgtgattaatgagaaaggacttgagttctatcgcaacctggttaaggaacttaccgatgcaggcatcgaaccgatgtgtaccttatttcactggaatcttccgatgtggttacacgaaaaaggcggctggtactgtaccaaaatttcggactactttgaaaaatatacggaaaccgtggtggaagccctctctgataaagtaagctactggatgacctttaacgaaccggcatgttttatcggctgtggctatgtgatgggcaatcatgcaccgttcgaaaaatgcatggatatggaacacccagaggagatggcacagaaaatcgcgctgttaagcaaaaatgtgttactgagtcacggtaaagcggtgcaagccattcgccgctgcgcgaaaaaagctccgaaaataggtatggccctgaatgcatcgcttttcaccccggaaaacacctccgaggagtcagttgaagcggcgagggcggcgacgttttctgaacagggtgctttttggaacctgaattggtgggcggacccgatggtgaaaggcgaaataccccgtgcgatgaaggatgtaatttccggcgaagaacgcgaaataatctgccagccgctggacttcttcggctttaataattacaacacgaacgattatgacgagtacgaaggccgcaatgaacgtgcctggcccggcatgccacgtacggcaatggattggccgatcactccggatgccttatactgggcggtgaagtttatttacggtcgttatggtctgccggtactgattaccgagaacgggatggccaacttagattttgttatgagcgacggcaaagtacatgatccacagcgcgtggaatttctgaaagtgtacttggcaggcctaaagaaagccgtaggggaaggtgtgcctgtcatcggctatatgtattggagcattcttgacaacttcgaatgggccgaaggctacgataaacgtttcggcctggtatacgtggattatcgcacgcagaagcgtacccgtaaagattcatcctactggtatgcagaagtgattgcgaacaacggcgcagatctgtga

SEQ ID NO: 522 - DNA, 2286 bp, Artificial Sequence
  6xHis UPI000C09BF88
atgcaccatcaccaccaccatgagaacctgtactttcaaggaagcatggatatcaaacgcaaagtcggtcgtctgatggctgatatgacgttagcagagaagattggtcagctgaatttattagcggcgggcgaaggcctcgttaccggtgcagctcagcatactccattggcccaacggttggatgcggggcaggttggcgcgatctttggaacgaaaagcctggccagtgcacgtgcgatgcaagaacgtgcccttgaagggagccgcttaaaaattccgctttttttcgcggaagatgtaattcacggccatcgtaccgtgtttccgttgccggttgcactggcatgctcatgggacctggacttgattgaagaaacgagtgcgttcgcggctgccgaagcaagctcagaaggattgcatcaggtctacgcaccgatgattgatattagtcgtgacccgcgctggggccgtgtcgcagaatcgcctggggaagatccccttctggcgtcgcgcatcgccgccgccgccactcgcggctttcagggtgcaggcatcgatactaatggccgcgtggccgcctgcctaaaacatttcgtggcgtatggtgctactgagtcaggacgcgactatgataatgcgtcgttggcgtgggaagatttgctcggtatctatctgccgccgtttaccgcaggtatagcggaaggagctgcgagcgttatggcgtcctttaatgcggttaacaaacttgccatgcacgcgcatgaaccccttatcgagggatggttacgtggtaccagcggatttgatggtctggtggtgtcagattatacgggtgtgatggaactgaccggccacggtctgggcccttcaccggttgtagtggcgcgcgccctgcacgcgggggtggacatggacatggtcggagaagattatctaaaggaacttccggcactcgccgcacgtggagtggatatgccggatgcaggagtggctttctcgtcggacgaaattcgcgcgctcatcgatcgttcatgtgagcgtgtgctcacatttaaagcgcgcttaggccttctcgatgatccgtttagaggcatggcggacaccactgcgccttctagacatgacggccggaaactcgcccgtcgtgctgcggcgcgctcggcggttctgctgaaaaaccgtggtgttttaccgctggcagaagacactgcggttgcgctgattggtccgttcgcaaaggatcgtcgtaatatgctgggtacgtgggcagtttcgggcaattccaatgatgtggtatcacttgatgccgcagtcacggcattaaccggtaccgtgcctcgaactgcctggggtgctaacattgttgccgagtcgtggctggaacaacgtctgaatgtacatggcgtcactgtggaatcagatcctcgcaccgaggcagatctgttattagaagcgctggcggaggcgcgccaggcggacgtcattatcgcaactgtgggcgaagcgaaagaagctgcgggcgaaagttcttcattgctcagtccggacattcctcaggcgcagcaccgtctgattgcggctctgaaagaaacgggtaaacccctggtcgttgtcgtatttgcgggccgccctctggctctgggagatatcccggcacaagcagacgccttgatttacgcgtggcacggaggtgttgcgggtcctgaaggcgttgcggatgttatctttggtgccgcggagccaagcgccaggttatgtgttacgttacccgcctccccgggagaagtgcctctgtcgtatgccgatgaacggacgggtcgcccgtttgagggccattttatgaaatttcgcacaggctggctcgacatgccggacggaattgagcgtttcccgtttggttttggcctgggctatggcgatgtgcgctatggtactccgtcgttaagcgcagccacggcggtcgcgggtgaaaaagttatgctgcgactggatgtcgaaaatcgcggggaccgcgccgcggtcgaaaccgtgcagctgtatgcgagtgatcctgtagctcgaattacgcgtccgggccgctttatgattgactttaagcagatcacgctcaacccgggggaaaaacgcgatgttgtttttgaagtagaagccggccagttcgcataccctgtagcaccgagcctagaagcggcagaatgggttcgcgatccgggtctgatccgtcttcacgtaggacccaacagccgcgatacccatccggtggaactcacgtggctcacctga

SEQ ID NO: 523 - DNA, 2214 bp, Artificial Sequence
  6xHis UPI0004B5EEF2
atgcatcaccaccatcatcacgagaacctgtacttccagggtagtatgaaagatatgcagacgaagatcgttatgatcggcatcttactgtcgactgggattatgcttcgtgcgcaagacaatggtggttgtgaagactgcccggcgttcaatgcaggcggtaaagtagaggtccgtggtgtgaaggagcgcattatcggagatttgtcgcagcctgtcgcggtgcgtgttcgtactctgattcagcagatgactctcgccgagaaggtcgcccaattagtctcggagtccgacagcattccttggttgaacttgcccgcatacaattattggaacgagtgcttacatggtgtggcgcgtgcaggagaggttaccgttttcccccaggcgatcaatcttgcttccacctgggacactgttctggtaaagcgcgtggcgagcgcgatctcgaccgaggcgcgcctcaagtacctggagatcggcaaaggtcttacctactggtcacccacaattaatatggcccgcgaccctcgctggggccgtaacgaggagacatacggcgaggaccctcatttaaccagccgtctcggcgtcgccttcgtgaagggtctgcaaggtgaccatcctacctatttgaaaaccgtcgcaaccattaagcacttcgtggctaataatgaagagaataaccgcttttcgtccagctctcaaatcccaaccaaacaactgtacgagtactacttcccggcttatgaggcgtgtgtcaaagaggcaaatgcccaaagtgtaatgactgcgtacaacgctttcaatggagtcccaccctcgggctcgcactggctcctggacgacgtactgcgtaaagagtggggctttgatggtttcgtggttagcgattgtggcgcgattggcgtgatgaattggcaacaccgcgttgtgaatagcttggaagaggcggcagctctgggcgtaaactcaggatgcgacctggagtgtggtacgacatacaaggaaaagctggtccaagcagtagagcaagggctgatctcggaagcggcgatcgatcgcgcattaacacgtgttctgacggcacgtttcaagcttggtgagtttgatcccatggagctggttccttacaaccactacgacaagaagttattagcgggtaagaagtttgccgagctcgcatacgaggcagccgttaagtccgtcgtcttattaaagaatgatgccttgttacctctgaataaggaaaagatcaagtccgttgccgtggttggcccgttcgccgactacaattaccttggtggatactccggtcagccgccgtatagtgtcagtcttctgaaaggggtaaaggaattgatcggcaagaagggcaaggtgacctacctgaacggtatgggcacgtcggcggacagcattgcgcaagtggtgaagggtgccgacatcgtgttagtcgcccttggttcagatgagaagatggcccgcgagaatcatgacatgccttcaatctatctcccagagggacaggagaagctgttgaaggagatttatcaggtaaatccccgcattgtgctggtatttcacacgggtaaccccctgacctcggagtgggcggatacccacatcccggcaattatgcaggcgtggtatcctggccaagaggcgggtcgcgctcttgcaaacttactgttcggcaacgaaaatccgtcgggtaagttgcctatgacaatctataaaacagaggaacaattacccgacatcttggattttgacatgtggaaggggcgtacttatcgttacatgaaaggggagccgctgtatggatttggccacggcctctcatacacatcgttcgagttcgacaacattcaggggaatgacacgctccaacccgacgccattttgcaatgttcggtcgaattatccaatagcggccaactcgctggcgaggaagtggttcaggtgtacgtttcgcgcgagaataccccggtttatacctatccattaaagaagctggtcgcgtttaagaaggttaagttagcctcaggtgagaagaagaaggtggacttcaccattgccccgcgcgagcttagcgtttgggaagacggcaaatggcgtatgcttagcggtaagtacaccttgttcatcggcagtgggcaaccgggtttggcgaagggaattactaagggtttcgaagttaaaatccgctaa

SEQ ID NO: 524 - DNA, 2595 bp, Artificial Sequence
  6xHis UPI000D7FE1ED
atgcatcatcatcaccaccacgagaacctgtattttcagggatccatgagcgatagccaagatttagataagttacttggcaaactgacccgagaagaaaaaatctcattactcgcagcggcggattggtggcgtacgcaggttatcaaacgcgatgacgtatttgtaccgcatgtcaaatttactgatggccctaatggggcccgcggtgaaagctatgtatcgggcatcaaagcggcgtgtttcccctgcggcaccagcttaggtgcaacctttgaccgcgaactgctttttcgcacaggcaaagaaattgcacgtgaagcgcaaacgaaagcagctaacgtgcttttagcgccgacaatgaatgtgattcgctcgccccgtggcggtcgcaattatgaaacctacagcgaagacccgtttgtgctcggcgctctggcggcggctttcgtgaatggttgccagagcatggggattgcggcaactccgaaacactatgtggccaatgagaccgaaaatagccgtactattctcacggcggaaatcgatgaacaaacccttcgcgaaatttatatgttaccgtttcaacttctgatgcgctgggcagaacctctgtgctttatgactcgatacgcgacctcgtacaaccgcgtgaacggtgcctatgttgcagatgatccgcgtttggtaaaccaggtactccgcggcgaatggggtttcgatggcgtagtcgttagcgattggatgggtgtgtactcaacagcaaactctattaacgcaggtgtggacctggaaatgccgggtccgacccgctggcgtggggaaaaactggcccgggcggttaatgatggccaggttgcggaacaggtggtagatgaatctgcccgccgtgttctccagcttgcatgccgactgaagcgttttgagcatccggaagagccgccggaagatgcagttgagaaccccgaacgtgacgattttatctgcgaatccggcgccgaaggtatggtacttctgaaaaacgaaaatatcctgcctctgcctaaaggggtcacggtcgcgctgattggtcatcacgctatggaagcaagccttggcgggggcggctcagctcgtgtcgacagcttacacgctgtatcgcctatagaggggctgaaccaggcaggtttccaagttaaagccgttcctggtgtatccgtgtttggcagcctgccgcacgcggatccgagcatcatgtattccagcgatacaaaaactcaagcgaaggatcctgtgaaattggaatggttcaatggccacgtggtgggtaaaaatccggtcttcagcgagacaaaggagcaggccgagtatatgattaaagaaaaatggcccgatcacctcaaccaagattattgcacccgtatgaccttcgacattcgccctctgagtagcggcgaccatatcttgagtattatctctacgggacctgccgtatgttacattaacggggataaggtatttgaacgcccccaggagacggatctgcgtccggaaagcttttatttttttaaaagcaaactggaacgtcgtttcacgtacccgatgcaggcgggacactcgtatacgctcatgcttgagagctggaacaccgatcctttgattctgcacgctaaattgctgttcggccgcatgttccagggaagtgctctgcgctttcatgagtttatcgatatccccagccgcatcgaggatgcccgcgccattgcccgtgaagtagaatacgcgattgtgtgcgtcggtaccactaacgaaattgaatctgagggcttcgaccgggaatcaatgaatttgccgagtctgcaatatgagcaaatcgccgcagtggcggcagtaaatccgcgtacaatcgttgttaatttttcgggcggacctgtgggcctgacccaatttattgacagtgtgccggccgttgtacaggcatggtttcccggacaggaagctgggcggtcattagcacgcgttcttggcggtgtcacaaatccgggtggtcgactgccgttttcatggcctcgccgtgatgaagacaacccgtcttttgcaaactttccttgtgatgaaaataatgtcattcgttatgcagaagggctcaatgttggatatcgctactacgatcgtccggagagtccggagtccctgttcccatttggttttggtctgtcttataccaattttaaagtctttggcgtccgtattacggatacctcaatttctgacccggagggtacagttatggtgagctgccgcgtccgcaatatcggtacccgcatgggggctaccgtggtgcagtattatgtctcacctccgcgtgatcaggtggaatcgcagcgtccgttgaaagaactgaaagaatttcgtaaactgtccctccagccgggtgaagagcaggatcttagcgttaccctagataaatattcagtgagttcatacaacgcgcagcaacactgctgggatgtgtcggaaggtcgttacgaggtgcacgtgggtctgtcgagtgcagagattagctcaacggttggttttcacgtcgggcgaggtttctcatggtgcggtctgtga

SEQ ID NO: 525 - DNA, 2730 bp, Artificial Sequence
  6xHis UPI000D802B25
atgcaccatcatcatcatcatgaaaatctgtactttcagggtagcatgacccagaaagcgtttgatgctggccaggtcctcaccaaattatctcttgacgataaaattcgcttatgtagtggcgcggacttttggcgcacctactccgatgcttcagtgggcttgccgttctatgccaaactgaccgatggccctaacggcgcccgcggaggtggcgactttaataattcaaccccggcagctctgttcccttcgccgtcgtgccttggcgccacattcgatgtggcgttagcccgccgcatgggtgaaggtatagcacgtgatagccggagcaagcgttgccatgtcagcttagcacctaccatcaacattcaacgcgacccgcgcgcagggcgtttttttgagtcgtattcagaagatcccgtcgtcagcggggaaattggagcagcctgggttcgcggttgccagtcggtaggtgttggtgcgacccctaaacatttcgttggcaacgaagctgaaacagagcgcatgcggtcgtcgagcgatgttgcaccggccgcgctacgtgaagtctatctggagccgttcaagcgaatctttcgagaactggcccgggaccatgcacaaaaacgtgaaaagggtggcgctcgtgggggttccgaagatgtattcggcggacagcctgcgtgtatcatgacggcctataatcgtctgaacggctggagttgtagcgagaacgaagcgctgcaagtaggaatcctgcgaaacgaatggggctttaaaggtcttgtgatgagcgattggtttgcactgcacgctcacggcttacgtgcaacgaacttagaaatgccaggcccgtcacttcatcgtcgcctggacgccgttaaacagcttctcaaagagggcaaggtgaccaccgaggatatcgatagaaatgcagaggctgttctgcgcctcctgaaaaaagtttcaccacttggcttttcctctagcccggacaaggagcaagaggaatcaattgacgacgccgcgattaacaccagcattcgacagatcgccgccgaaggcgcggttctggtgaagaacgacgataacattttgccgctcgatcccaaccgggtcaagaaaatcgcgctgattggaaaaccctggaccgacgcaatacagtccggtggcgggagtgcaaatttaactccgcagaaagtcaccgccccgctggactgtctccgtgataccctgagtcgtgatggccacgcacatgttgagctcttgcatcactttggcactgaaattcaccgcttcccgccgaacccctcaagtcacgccctggaaggcaaaaaggtgcgtcttgactttttaaaagaggggcaaccagtaactactacggaagttgatttgccatttctggatcgtagcgcaccattaccgggagaagagaaaggcgaaaaagtggattttgatacggttaaagcacagttccaactgaaaggtagcgatgcaggtacctatcgtctgggcctgattgcctttggtaccctcaaagtgcaggttgttcgcgatggcaaacaaaccgatgagtgggattatcaaggtgagcgttcgtttttcgactacgtattgaatccggcgcgtgtgtgggaaccgagacttttcgaaatgggtcaggatgaggctgtgaccatacagttagagtacagtcgcgaagccttttccatgccgggcatcagccctgaagaagcgtacgcggcccgtgcatttgggttccgcgtcggttttgaacgccaaatcgatgatgaagcggccctgaaggaagcctcggaattagccgcaaagtgcgacgtggctatcattatgacggcaacggggaaagaattcgaatccgaaggctttgaccgcgatacccttaaattaccgcgtcgccaagatgatctcgtgaaagcagtcgcaaaggtccaaaaaaaaacggtggtattaaaccagaccgggtcagtcgtagagatgccctggattgacgaagtgaaaggcatcattcaggcgtggtttggcggccaggaaacgggctgggccatttgtgatgtactcttaggtcatggccgcgcgccggcctctggccgttttgcgcagacgtgggccaaaagcctaaaagatcacccgagcggccagcacaaagatgaattcccgggcacccacagggcgggcgatattgagggtccgcacgtgacctatgcagaaggtaggctcgtaggctacaaatggtatgatcgccgttctgtggaacccttgttttggtttggacaagggctaggtggctacaccacctttgaagcgagctttgctaacaaacaagaaggtccattaaccctcacgcgggaaaccggcgctgtcccgatcaagatccaaattaaaaacaccggcaagcgctccggtaaatacgtggtccaggtatacgtgcgtcgggctatggcggcggatcgcgaagaagatgaacctaatcagaaactggctgcttttttagcggtgcagactggcgccggtcaaacaaccgttgttgatctgaaagtggaaaaagaagacgtttcatcatgggacgaagcccagaaaaaatggcgtgtagaagcaggccaatatgacttaattttggcaaagagcgctgatcctcgcgcctcaatcgaggaagtacctctccaggttgatcaaggttgggtgtgggagggaattggtgatgtgtga

SEQ ID NO: 526 - DNA, 1680 bp, Artificial Sequence
  6xHis UPI000DC60823
atgcaccaccaccatcatcacgagaacctgtatttccaaggcagtatgattccgaataacttcctgagcctgcagaacgtggaggatcgtacccttcacgaactgtacatgtggccgttttacaatgccattcgttcgggagtagcaaacgttgtatgtagctataaccgtgtcaaccagagctatgcgtgccagaacagtaagctgctcaatggcttgctaaaaaccgaactgggcttccagggctttgtagtcagcgactggatggggactcatgctggtgtagcgagtgcgaatgctgggcttgatatgactatgccgggcgcccaatggtgggatccaatgggcccgggcgtaccgagctattatggggcaaacttaaccgcggcggtaaataatggatcggtatcactggaccgcattaatgatatggcgctgcgcgtgatgaccccgtatttcttcctgggtcaggatcaagacgatttcccgctgattgatggctatagcggtgtctacccggcaattaaccactttaacgccccgagtttctgggaggatcttgcatggaatagcagcatgggggcctcaatgagcacatttgtcgaaactattgcatcgccgaaggtgattggcatctttggcaacgccgctggggatatcaccaacggtccgtatcatcatgatcaaaaatacgagtacggttgtcttcctattggcgggggtagtggctctgcacgatacagccagctagttactcctttagaagctattaagattcgtgcccgtaaaaatgggaccaatctccaatacattttgaacaacacacagctggcggttccgggctcattctcggaaatgatctaccctgaaccggatgtatgtctggtgtttgtaaaagcctattcaagcgaaggcgaagatcgtaaaagcttagcactggattgggaaggcgacgccgttgttgaacagattgcgggtaattgcagcaacacggtggtcattagtcaggccgcaggcatcactctgatgccgtgggcgagtcacccaaacgttaccgccatcttagcgacccacctgagcggcgatgaaattggaaacagtttagttgatgtattatacggtgcgtacaatccgtcgggtcatctaccgtataccattgcctataacgaaagcgactatgatttcgcgccgatcgtgacctcggcaaatagtaccgccccaggcgcgtggcaggcggatttcaaagaacgcctgctgatagactatcgtcacttcgactactacaacatttctgtcctctatgaattcggtttcggcctgtcctacaccacctttaacctgaccagcctgaatattagtccgctgtataatgatactctgtcatgcaatccgctgcctactcccaaacagcaagatcacccgcgctggaaaccggacctatggacaccagtttacagcattaccacctctgtgtcaaataccggcaacttcagcggagccgccgtaccccaactatatattacgattccggacacggagggcggcacccccgttaaacagcttcgcggttttgaaaaagtgggcctggacgcgggcgaaactaaggaggtgaaatttgagctgatgcgtcgcgacattcagtatttaggctgtggtattgcgcgtatggccgatccctga

SEQ ID NO: 527 - DNA, 2520 bp, Artificial Sequence
  6xHis UPI000F52D773
atgcaccaccaccatcaccatgaaaatctctatttccagggtagcatgatttacaaagatgcgtccaagagtatacacgaacgcactgaagaccttattaaacggatgaccttaaaagagaaagtcgcacagctgtactgtgcaaacagctatggcggagaaagcgtttatgattcgcgtatgcacaaactcaaggatgggattggaaccgtcagctatttgaacgatagtttcaccggcgacctgaagaaagatcgtgagacgattaatggtatccagaaatatctcgtggaagaaacacgcctgggcattcctggcctttttcatagtgagggtattgctggagcgcagatcccgtccgccacaacgttcccgcagtcgctgaacctggccagcacgtgggaacccacattggcgcagaaaatgggggaagtagtcaaaaagcagctgatctccttcggttttcgcgcagtgcactcgcccctgtttgacttagcgcgagaccctcgcttcggacgagttggagaaacctatggcgaagatccgtatctcgttgcacagatgggtgtgagctttgttaaaggcatccagggtgatcatgaaattatggcgaccgcgaaacatttcgtgggctatggcaatgctgaaggcggtcgcggcggcggcgagcaacagatcagcgaacgccgcttactggacagctattgcttcccgtttgaagcggcgattcatgaagccaaaattaaagcggtgatgaacagctacggcatgctcaatgatcaggcggtcagcacctcaaaatggctactgacggacgttttgcgtaataaactgggctttcaaggtctggtcgtggcagattacggctctattacccacgcgtttctgcgataccgtgttgccgaagatgcgaagggcgcgggaattctcgcattcaaagccggcatggatgtggaacagccgggtaaccagtgttaccagcatttagtagaagccgtggagtctggagaactagaagaagcgcacattgacgtctctctgcgtcgcgtcctggaaacgaaatttaccctgggcttgttcgaaaacccgtacgaagccggggactttttctatgagattaaaaaagtggagaacgaagagttatccctcgaaatcgcggaaaaaagcatggtcctggtcaaaaatgaagatggcattctcccattaaacaaaaaactgaagatcgcattgattggcccgaatagtgacacgaaaaccaacttttttggcggctatagctctgtaggctcggcctctacgaaatcatctgacttcgacaagagcgaagaggacagcttcctgcgtatgctctataccggtacgattacagataacaaagaaagcctgaaatcaatgggcatcgaatttgacgaaaaaccgactcccgaacagaagtccatcattctgaatatgattagacaaaacttgaactccgacgattcatctaaccgagtgtaccgcaccaatgaggaatttgtccagatgttctacccggactgcaaatccgtgaaagacgtactggaagaagaattcggtaaagaccgcgttctgcacgctaaaggctgcgatatttttaaggcgattgatggcggaatcgaaacggttaaagccgccgttcagcaggccgacattgttattgcggttttaggcggaaaggaatcaatgattgatccggaggccacgtgtggtgaaaataaagataacattaacatcgggctggaaaagccgcagctggatttgatggaagaggtatttaaactgaacaaaccggtgatttcaattgtcgttgatggtcgcccgttaagcacgccttatgtgagccagcagagcaaagccgtgctgtactcgtggctgccggcccagttcggtgcgaaagctatagtaaacattctgacaggcaaaatcaatccgtccggcaaactaccggttacaatcgttaaagaatcgggtcagattcctatgtactcatcacgcctgccgctgtatgtagatatcaatgaatacgcggagtacatcaaaaccaaccagaacacgccactgtatccgtttggtcacggtctgtcctatacgcagttcgagtattccgaattagtacagaatgcctcagtccaagcggatggtgatctgagcatcgcgtttaagctgaaaaatacgggtcaggttgcaggtgaagaggttgtgcaggtctatatccgagatcaggtaagcagcgtggcccgccccgttaaacaattagtgggatttgcccgcgttaccctcgatgtgaacgagaccaaaatagtacaatttaaagtgagcatgaaacagttagcgttccatgacctgaatatggatcagattgtggaaccagggaaaatggagatgtatatcggcgcctccagccaggacattcgcctgaaaggagtatttgcgatcatcggggaaaaacttattgttgaacgcaaggtgttttcaagcaaagtcaccataacggaattgtga

SEQ ID NO: 528 - DNA, 2298 bp, Artificial Sequence
  6xHis UPI000F6DAAAE
atgcaccaccatcatcatcacgaaaatctgtactttcagggctccatgacgactgctccggcggatcagctcactgatgcccaaaagaatcgaattgaagaaatcttggctagcctgtcgtgggaggaaaaactcaaccaagcgcagattacgttcaaaatgagccaggaagaatgcttagcagcggcccgtgggggtatcggtgcgctgttttggccgggtgatgcggcgcgcaccaatgcagttcaacgtgccgcagtggaagaaagcgcacatgggattccgctgttaatcggtttggatgttatccatggtcagcgcactatttttccgaccccactggcaatggctgcgtcttttacgaccgccgtagcaaggagctgcgccgaagtcagtgctgctgaagcgcgctccgggggcgttacctggacgttcagcccgatggtagatgtatccagagatccaaggtggggacgcgtcgcagaaggcttcggtgaagatccgcttcttacgggcgccatgggtgcggcaatggtggccggctatcaacgtgaacgtttggacgaaccgggtactctggttgccacagcgaaacactttatcggctatggtgcggcggaaggtggccgagattacaatacagtggatatgtcagcccagcgcttacgtagtgtttacctgccgccatttgcggattgtgtggaggcaggcgtcggatcagtgatggcctcgtttaatacggtaaacggacgtcctgttcatgcaaatcatcgcctgttaacggatttgttgaaaaacgagctgggtttgacgggcgcagttgttggcgatgctagcggcgtagagaatctgatccctcatggtgttgcggccgatatggaacaggcagcgcgaatgagtcttgtagcaggtttagacgtcgaaatgggcgggcacctacatgatccggcagctcgccctaaagcccctgccctactgagcgatgatgatcccgtgttagtagcgcgcgttgacgatgcagtgcgacgtgtattaacattgaaaatggcattaggtctattcgaccacccgtatgtggatgaggcaagcgaaatcacgtcgccagcgcccgagttattagccgcagcacgtagcgcagccgaactgtgcccggttttgttaaccaacgatggcgctcttccgattgcacctaccacccgccgtatcttgttagctgggccggcggcgacttcaaccgatcatctgggcgcatgggtccagcatgtggcggctgcacctgaacgtagcttggcccagactctaccggttgctctggcagccgcggcaagcgcggtcggtgtgccggcgccagaacttaccgtcttgggtggccaggaccctcttggtgtcaccgcggaacaggtggacgccgtggcgagtgccgcgggcgaggccgacctggtcgtccttgcactggaggagccttcgcaattaactggtgaagcgacctctcgtgcagaccttcgcttacccgggggccaagaagctctgattcatgcggcagtggccaccggagcccctgtggtggttgtcctcgtgaacggccgcccgctagtcgtagaagattggattgaagaaccggccgcggtgcttgaggcatggcatctgggaactctgggccctgaagtgatcgccgatattctgaccggtgccgtaaacccgtcaggtcgtcttcctatgggctggccgcgcagtgtgggccaattaccggcagcgtacgatgctcatgaacgcaccggccgacccgcgacggtgggcggcaccatgattcgcccagcattcgatatgggacttgatggacctgctaatctgcaagagttctttacctcgaaatatcgtgatctggaactgggtcctcgctttcgtttgggccacggtctgtcttattcgacatttagttaccgagacgcgagtctgtctcgttccgaaattagcgccgcagaacttgctgatggagcaggagtggaagtgcgcgttaccgtcgcccacgaagcaggccccaaaggtgaagaagtagtactgctgtttgtccgtgatgtggtagcatcgttagccccggccgtacgccgtatggcaggctttcgccgcgtggcggtgccagcaggcggtgaagcagctgtcagccttcgtctgacagaacgttccttggctctgtgggatgatgacggcgcggggtggcgtgtggaacctggcgaatttgagattcgtctcggtccggatccgcaggcagagccattacgccttaccgttacccgttga

SEQ ID NO: 529 - DNA, 1590 bp, Artificial Sequence
  6xHis UPI00113D19DF
atgcatcaccaccaccaccatgagaatctgtattttcagggcagcatggaaaagaacgtgatgagctgtgtgaaacacttcatagccaacgaacaagagaccaatcgaattccaccggcgcttattccgggcgcattgaatcagagcctgtcctcaaatattgatccgaagaccgaacacgaactctatatttggccattccaggatgcgattcgcgcgggtgcggcaagtgttatgtgcgcatacgcccgctttaacaattcttatggctgccagaactcgtatagcatgaatggtgtgctgaaaacggaactgggattcgaaggctttgtagtgagtgactggggcgcgcagcgcgcgggattagcaagcgctaatagcggtttggacatggcgatgcctggttcctcatactggcagaacggaaacctttctaaagctgtgtcgaacggcagcttgacaaagagccgcctggatgatatggccacccgtatcctttccacgtggtatcgcttggaagaactgaattccccggcgtttcagaatcctggttttggtctgccggcaagcaccacgggtccgggtgtggcactgaatggcacaatgattaccgggggcggtagcggctcgattaccccggcttacattgatgcaccttatgatgcattccagcgccaggcctatcaagatcgtaccctgcttgcatggaactttgttgacttagacgtgacggtagatcaggcgagcgaacattgtatcgtgtttattaacgcgcaatcaagtgaaggctgggatcgtccggacttagccgacgcgggcagtgatcgcttagtagaaaacgtagcgagccaatgcaactcaaccattgtggtcctgcaccatgccggtgtacgcttggtggatcgttggatcgacaacccgaatattaccgcggttattttcgggcatctgcctggccaagattcgggccgtgccctgatcgaaatcatgtatggcaaacagagcccctctgggaggctaccctacactgtcgccaagcgtgatgcggattacggcaatctgcttggaccggtactgccggttggcgtggattactacactcaggataacttcaccgaaggcgtatacatcgactataaacattttattgcccagaacattacgccgcgctacgaattcggttttggactgacctactccacgtttgattatgcgtcaatcggtgtatctcaaggctacgcaaatacccagtatttagcgcccaacacgacagttgccgagggtggtctgactagcctgtgggatacgattgcaactgtgacgttcgatgtgtgcaacgttggctcggtggcggcagctgaagttgcgcagctgtatgtcggtattcctggaggtccacagaaagttctccgcggcttcggaaaacagttactgcagccgggcgagacgggccactttagcttagcgctgaaccgccgcgatctttcaacctggacggcgcagggttgggtacttcagaaaggcacttatcagctgtacgtagggaaaagcgtgctggacatccagctcaccagttcactgaccatctga

SEQ ID NO: 530 - DNA, 2700 bp, Artificial Sequence
  6xHis UPI0000EA8672
atgcaccaccaccatcatcatgaaaatctgtatttccagggcagcatgcaggttaaatcggaaagctcagtgccggaaatgggggacctgcagaccatgaacgcagccgtcgatgaggttaccgactcgtcacgggcaggtaccccaacgtcccaggatgagtccacccgcgaagatgcagcccgtagtgtgcaaccgaactttaccagcctgctgccgcagctgaccctggaagaaaaagtggatctgttgtcgggcaccgattttgtgcattcctccggggtatcgcgcctgaatatcccacctctgaagttagttgattccgttaatggcgtgaaaggaagcgaactccatcacggtgtccctaccgccatctttccctcaagcacgctgtacggcgcgacatggaataacaccctcatggaagaacttggccgcgcgctagcgtatcaggcgaaactgaaatcggctcaggtcattttgggccctacgattaacatacaccgagatccgcgtggaggccgtaatttcgaatgcatttcggaagatccgctgctctctgggcagctggcagcgggcgtggttcgaggcattcaatcacagggcgtggcggcgtgtccgaaacatttcgcgtgcaacgaatccgaatttaaacgccgagaatatagcgttgcacagtcccacaattcccgtgccgttcgtgagatttatcttgccgcgtttcaagaaatgctgcgcagaagtgaacctcacggcctgatggtgtcgtataataaactgaatggaacccacaccacagaacatccgttcctgaaggaaattctccgcgatgagtgggcctataatggttgtttggtctcggattggttcgctacgaaaagttgcgcggcgtctattaacgcgggcttagacttggagatgccaggtccaagtgtgtttcgcggcccgaaattagtggccgctgttcgcgacggcttagtggatgagaaagcggtggatgaatgtgtgagccgcgtccttgcgctggttgagaaaacgcgcgaatcacatagccaggaaccagaacgatctgaagtgagcccggaaaccaatgcgttggcccttaaaatcgcgagcgaaggcattgttctgctgaagaatgaacagggcgtcctccctctcgacatgcgtcgtgccccaaaaattgccgtcatcggtgttccggcgagcgagcctgtagtgtcaggcggcggcagtgcgagtgccccgccccagtacctccaaaaaccgttagactacctgcgggatgcgcaccctttcccgtcactggtgaaatacgcacgcggtgtgaataccaatcgtattgtaccgattgtgcctctggactgcacgacctcgaaaaatggttcacccggcttcgacgtagcgtactttaatgaaggcagcaacatgcccgtctgcacagagcaccagaaaactccggtggtggcgatggtgcgtaatctgaaacctggccttatggaaccgggctttagctacgagatctccacgaccatcacgccgaaaactaccggtccgcacacactcgccgcgcgggtgacaggtagctttagcctctttgtggaaagtaaagccgtgttgagcgtgcccaaccagcacgaagttacgatggaggattttctgttcgagcctgcacgtttggagcatcgcatctctgtgtttatggaagcaggaaagccctacctggtgcgtctgcttagtcgcgcgcgtatcccacgtgagaatgactacgaaccgaccccgcatggcgctaccttatgttacgaagaattcagcgacgaacgcgccctcattgcggaagccgttcaagtagcgtcgagcgccgatgttagcattattttcgctgggcgtaatcaacagtacgaaagtgaaggctttgacctggactccatgaatatctcagaacctcaagtgcgcctcatcagggccgtgacggcagtgagcaaaaagaccgtcttagtactgaactgcgggaacccgatcgacctgtctccatttgtgaacgaggtggatgcgatattaaacgcacactttccgggtcaggaggggggccaggccattgcgaacatccttactggcaagactaacccatccggccgccttgcgaccacatggccgaaaaaatttgacgaagaacatgttccgacttaccataacttcccggcgcgccttacggaacggggttatgaaattaagtacgaagagggcttgcagatcggttatcgtcacccccaatcgcagcgcaccgcgcagtggcagtttggccacggcttatcttatactacgttcgagtatagcggcctgactgtgtcaggacaggaaatcaccgaagaagcgggtgattctgatttaaagattagcgtgcgcgttaagaacaccggcatatatcctggccacgaagttgtccagttatatatttcgccgccggattcgaccaaagtgtggcgtccagcccgcgctctgaagggttatgcaaaagtttggattttgccgggcgagagcgagaccgttaccatctccctgaataaaaagcacgcattcagctattgggacgaagacgtcaaacagtggcgtctggagcctggaacctatcgtcttctcgtgggccctttttcgaccccgtttgagattgaacactccctgatgtgggcgggtcggtga

SEQ ID NO: 531 - DNA, 1377 bp, Artificial Sequence
  6xHis UPI0000D7314B
atgcatcaccaccaccatcatgaaaatctgtattttcaaggcagtatgactccgagccccgcgccgtttaatccgggtttcatctggggtgtagcggcgagcgcggcacagaccgaatctcgtaatggtcgtggtcgtagcaactgggatctgttctgcgatgaacgcgggggcgttctggatggttcaaccaacgcactttgtaccggctttgaagaacgttacccacaggatctggcactgcttgccgatgccggcgttcaagcttttcgcttttcgatcgcctggcctcgtgtacagcctaatggtcctggcccagcgtctgcagcgggcttagaggtttacgaacgtatggttgatgccatgctggaacgcggtcttaccccgtggcctaccttgtttcattgggatgtgccaacctgggcgggggattttcgtgatcgtgatatttgtcagcgctttgcagactatgcggaagttgtggccgaccgcctgggtgatcggattgatcagtggattgtgctgaacgagccgaatagcgtagcactgcgtggttatgcggcgcaagtgcatgccccggccctcgatagcgcatcagccgcgtttgccgcaatccatcatcagaatttagcacagggtctggcctttcaagccctccgtgcaagtctaccgggtcgtccgcgcattggcactacagtgaatctgcagccggttcgtgcggaacatggtcaacgttatgatacgcaggtacatctggtcgatgctctctggaatcgtgcgtttgtagaccccctgtatggtaaagggtatccggcacctgtggaccgactcgtggcaccgttagttcgtgaaggcgatatgcagctgatcgcggtgaaaccggatttcctgggtttgaactattactcacgtatatatgtgcgtccggattcaggtggttctctgggagtggcgcaaggggaagcgcctgcgcaattaccgcgtaccgattattttcacgtggagccagatggcctgacggaaatgctgctacgcctgcatcgtgattatgatgcaccggaattgtatatcaccgaaacaggatttgcagttcctgacccggcgccccgcgacggcgttgttgaagatcaccagcgcatcggctacttagcctcatacctgaaagcagcacaagcggcacaagcagaaggtgcgcgtctaaagggtttgttctattggagtgcgaccgacaattgggaatgggctcaggggttcgccaaacgtttcggactgattcacgtcgaccggaacgatctgtctcgcacacccaaacgcagcctgcattacttcgcggagtgtattagggccaatgctgcgttagatgcccctaagcactga

SEQ ID NO: 532 - DNA, 2553 bp, Artificial Sequence
  6xHis UPI00018E7266
atgcatcaccatcaccaccacgaaaatctatactttcaggggagcatggcgattcctgactttgatgtagatagcattctgcagcagctgaccttacccgaaaaaatctcactggtgagcggtcgcgacttttggcataccactagcgtgccccgattgaaaattccggcgatccgtctgtcagatggcgcgaccggcgtgcgtggcatcaagtttttcaatggtaccccagccgcgtgcctcccgtgtggtaccgccttaggcgcaacatgggatcctgagctaattgagaaaggcggcgcgctccaggcccgtgaaggtattttaaaaggcgcgagcgtggtgctcggtcctactaccaatattcaaagatcaccgctaggcggacgcgggttcgaaagttttagtgaagatccatttctggcgggcacccttgccgcggcgactattaagggcttacagagcaacggggttgcggcgagtctgaaacatttcgcctgtaacgaccaggaagaccaccgtatgtctgttaacgcgattgttaccgaacgcgccttacgcgagatctaccttatgccgtttcaggtagtccagcaaatctacccgccttggacctacatggcctcgtacaataaagttaacggtgtgcactccaccgagaatatccatctgctgaaagaagttttacgtgaagagtggggcttcgacggcctggttatgtcagattggttcgcgacatattcggcagacaaggcgatcttggcgggcctcgacctggaaatgcctggccctagctacgcacggggagcggctctgcgtcattcaatcctgccgggcaaggtaaaagaatacgaattggatgcatgcgtgcgtcaggttctgcgattaatcaaacgagtgttgcccttgggaatagaagaagatgccgaagaacgcaccgatagcaacccagacacatctaaattgttgcgttcaattgccgccgagagcattgtcctactgaaaaatgaaaatgccgtcctgcccttctgccccgacaaatttaccgccgtgatcggcccgaatgcggattttgccgcgttcagcggcggtggttcaaccatgatgaccccgtattacacggtgagcccgttggaaggcatcatgagtgaatgcaaacaagttggatatagccttgggtgcggcggatggaataaactcccagcactgtctcggttgaccaaaaccaaatccggtctccagggcctgactatggcagttcatctggaaccgtcaacccgggaaaaacgcgaactgctggaggttattcatgtttccgacagcgtaatggacttttgcgattacaagcacaagtcaatgggtgacgattacttgttctatgctgacttccgcggtacactgataccggaggaaagcgcaaactatcagttcagctgtagtgttctgggcaccgcccgtgtgtttgtggatgatcagttgctcatcgataacgccaccaaccaggtacgcggtgataccttcttcgccaccggtacacgcgaggaatttaatacgattttcttagaaaagggacgggcctacgagatttatgtcgattttggctctattgcaacttataccctggaagtggcgagcaccgcaccgtttggcggcggcggtctgcgtttaggctgtacacgcgtctttgaccctcagggcgaaatccagaaagccgttgcactcgcgaaagcagccgagcaagtggtgctgtgcatcggtttgaatggggaatgggaaagtgaagggtttgaccgcgataatatggatctgccgggttacacggatgaactggtccgcgcagtggcccaggttaatcccaatactgccgtgattgtgcaaagcggaacaccggttactatgccttgggttgatcaggtcccagccattttacaggcttggtacggtggcaatgaaaccggcaatggtattgccgacgtcatatttggtaagaagaatcccgctgctaaattaccactgtcctttcctagccgtctggaagataaccccagctttattaacttcggtaaccaaggagggcgcgtcctctacggtgaagatgtcttcgtcggttatcgctactacgaaaaatccaaaaccccggtggctttcccgttcggtcatgggctgtcatacaccagcttccactttgaaactctgcaggtaaaaaacgacggagagagctttctgatctcagtggacgtagcgaacacgggtgtcgcagacggcgcgcaagtaattcaggtttacgtggcccatattgacccgctgatccctcgcccgcttaaagaacttaaaggcttcaaaaaggtgttcatcccggtaggtgaatcgcgtgtggtggatatccgggtgagcgtccgtcatgccacaagcttctgggatgaagatcgcaatatgtggttatcggccaagggtgattaccaactcctggtgggcgatagcagtgcaaacacgcctttgtgtcatcaggttactgtggaagagaatagctggtggaaaggtttgtgtaactga

SEQ ID NO: 533 - DNA, 2310 bp, Artificial Sequence
  6xHis UPI000A1A5FD7
atgcaccaccatcaccatcacgaaaatttatactttcagggcagcatgactgattcaacggcgacgccgccggaccccatcgccgcgaagttgacctttgcccgcggacgcgattattggacgacccaggccgcgccggaaattggtttacgcgcgcttcgttttgccgatggtcctcatggccttcgtgttcaagacgatgagaatcctgatcatctgggcttagaacgcagtgcaccggcgacttgctttccacccgcagtcacccttgcgagcagctgggatgcagctttgattgaagaagtgggggcggccctgggccgtgaagcacgtgcagctggcgtcgacgtcgtgcttggaccgggtctgaacctcaaacgctccccgctgtgtggacgtaactttgaatattattccgaggacccaatgctgtcaggtttactggcgggcgcctcagcgcgtggcatccaaagcgtgggggtcggagcgtgtttgaaacactttgcggcgaactcccaggaaggagatagaaaccgcatatctgcggatattgatgaacgctctctgcgtgagttgtatctgaggaattttcaacttgcactggaagcgtcaggagcctggtcaatcatgaccagctataaccgtattaatggcctccacgcaagccaggatccatggttattaacgcaggtccttcgggaagaatggggtttcgatggcttagtaattagcgattggggaggagtgtatgatccggtggcagcacttaaagctggcatggatctccgcatgccgggcggggcacttgacgatcgtctaattgcagcgcatgcacgcggtgaaattgcggaaggtgatcttgatcgcgtcatcgcgaatacgacgcgcttagccgaacgtacgcgtcctcgtgacacggacgtcccccccgatgtagaagcgcaccacgcacttgttcggcgcgcagccgcagaatcgtcagtcctgctcaaaaatgacggagtgctcccgctggacccagcccgctacccgaaagtagcaattttaggtgagttggcccgtaccccccgtatccaaggtagtggctcttcgcgtgtccatcctcgccgtgtagtagcgccactggatgtactgcgcgaacgcctagctcagtccggagcgcaagtggcttttgccccggcttacggattacaaaatgggccggccgatgcggcgttaatcacagaggccctccaggttgcacgtgacgccgatattgttttgctgttcagtggtctgactgatgcagcggaggcagaaggttccgatcgtacccacattgatttacctgatcagcagcttacgctcctggcggcactggctgattgcgacaccccattagtcgtttcactggcgaatggagcggtagtccgttcgactcagtggcgcgataccgcgcaggccatagtcgaattttggctctcgggccaagcccatggcgaaactgtcgcagacgttctgcttggcgatgtaccgccggccggacgcctggctcaaaccatcccgcgccgcttacaggatacgccggcatttctggatttcccgggggagcaccgccacgtgcgacattctgaaggcttacacattggctaccgctggtacgacgcacgcgatctggcggttgactacccgtttggtcatggtctgtcgtataccagcttcgattacgaagagttagaaattgatgtccgcgcatccgacgatgacattgcgtttgttgctcggttgacactgcgaaatagtggcgcacgagcaggttcggaggtcgttcaactgtacgcatctgacccgtcaactgcctatcagactcctccgcgtgaactgcgcgggtggcagaaagtgcacctggaagccggtgaaagttgtgcggtgagcattccagtcaaacgcgcccacctgggccattggcatagtggcctaaagcgttgggtctttgctggtggccccatgactttacatgtaggcgcatcatctcgtgatctgcgcctgacatgtgaaaccgaactgcatggcgaagcgttaccggtggttcttaccccgtggagtctgttcggtgaatggatgcaacatccggttatgggtcctaggattgaggcgttatttgcgagtcgtggtggcgttaagggtcgtgccggtgatttactgagtgacccggcaggtcgtaatacagtctacattaatccgctggctatgttagctcagttccccggtgtgcctctggaccaaagcgatcttgaaaccctttgcgcggaagccgctgctctggcctga

SEQ ID NO: 534 - DNA, 1395 bp, Artificial Sequence
  6xHis UPI000C98D37C
atgcaccaccatcatcaccacgaaaatttgtattttcagggaagcatgaacgatcttgagatcattcgcgattttccggaagagtttatcttcggtaccgcgacgtcctcttatcagatcgagggcagtatgcatggtggatgcggcctgagtcactgggacacctttgcgaaaaaagagaacgcaacgttcaaaggtcaagacggcagccgtgcctgtgaacatattttccgttggaaagaagatctggatctggtgcgcgatgccgggttttcagcttatcgctttagcttcagctggcctaggatacagccggacggcattggcaaagtgaataccaaaggaatcagcttctacgacgaattgattgatggcatgctgcaacgcaatctgttaccgtttgcgaccctttatcattgggatctcccagagcgtcttgccgacaaaggcggttggcaaattaaagatacggcggaacggtttggcgattacagcgaaattattaccaaacactttggggaccgcctgtattcaaccgctaccattaacgaaccttggtgcatctcttggctaagccattattggggcgaacatgcaccgggcctgaaatcactggaagcaaccgcgaaaagcatgcacaatattctgctggcgcacggtaaatcgattgaagtgatgcgcagtcttggtcagaataacctgggcatcgtgctcaataagacccacgtgcagccggtgtcgcagtcggatgaacacatcattgcggcgaatctgtttgacgacattcataacctgtggttcgatgaggccatttttaagggccgctatccgcagaaactcctctccatctttgaaccgcacatgccggagaattaccagaatgacatgggcattatcagtcagaacctggattggctgggagtgaattactacacccgctctattgtgaagtcggacgaatctgaaccgaactttaagttctcgctggtggaaggcgatctgccgaaaacggatatgggctgggaaatttttccgaatggtctgtccaacgttctgcgccgcctaaatagcgattattcgaaaaacaaaccgatccatattacggaaagcggcatggccaatagcgaccgcatgatcaagaacaacgtagatgacaatgagcgcatctccttttatagcgcgcacctgaaagaaatcgagaccctgagccgcgaaatcccgattaaatcatatttcgcctggagcctcctggacaactatgaatgggcctttggatatcaaaaacgctttggtctggtgtatgtggattacgatgatctgaaacgtattccgaagagctcctacaaagcattccagaaagccctgctgtcacgtcacaaggggatgaataattga

SEQ ID NO: 535 - DNA, 2277 bp, Artificial Sequence
  6xHis UPI0006F9793E
atgcatcaccatcatcaccacgagaatctctattttcaaggatcgatgcgccgcctggcgcgttggattattcgcggagcggcggcttgggcagttgttcttggcgcgccggcatctgcggtagaaccggtagaaagccgaattgaagcgctgctcgcgcgaatgactctggaagaaaaagcaggtcagctgaaccttattagtcatgagccgattttagaccttgaaagttttcggcgaggggaggtgggcgcggtaattaactttaataatgcaggcctggtggctcaggcagatcgtctcgcccgtgcctcacgtttaggtattcctttactggtcggactggatatcgtacatggctatcgaaccatcttcccgctcccgcttgctatggccgccagctttgatgctggccttgtgcgccgggcagctgctgcacaggcacgcgaatcagcgatggtggggctgaattggaccttctcaccgatggcagatgtagcccgagatctgaggtggggccgcgtagtggaaggcctgggcgaagacccgtggcttacgggtcgtttaacagccgcccaggttgaaggttttcgtgatgggggtctggcatcaactctgaaacatttcgcgggctatagcgcggttctcggtggacgtgactatgacgcgacgtttgtggcgccgaccgaactgcatgatttgcacctcccgccgttccgcgacggcattcgtgcaggcgctgacgccgtaatgaccgcactgactgcccttaacggccttcctgcaaccgcagacccggcgcttatgactggcctccttcgacgtcagatggggttttctggtctggtcgtggctgattggcaagccattgccagcctgatgaaacacggtgtagcacatgacggagctgaagcagcccgtaaagctcttgcggcgggggttgatatggacatgacctcagggctgtttttgcgtcatttaccagcggaggttcgcgcgggacgtgttccggagggactagtagatgcagcggtacgccgtgtgttgcgcttgaagtttggacttggtttatttgatagacccgtggttgatccggatggcgcggaagagaaactgttacgtcctgaaactcgcagattagcacgtgaagctgcgcgtgcaagcttggtgttgcttcagaatcgcgaggatctactgccgattgccccggctaaagttcgtcgtattgctgttgtgggccctttcgcggatagcgcgtgggaccaagttggcccccatgagggtacaggtcaggagtgggacgctgttacgattcttgctgggctgcgtgagcgcgcggcagccgcgggggtagcgattgacttcgccccgggctgctcccgtgtgtgcgatagtcgcgccggatttgctgctgctgtggaggcggcggcgggtgcggatttagtcgttgcagtcatgggcgagccacgcgaccgttctggtgagggcagcagtagtgctaccctttcgtggccgggactgcaacatgatctattagctgcggtggcagaagcaggcaaaccagttgcgttggttgtagtaggtggccgtcctacagaattgggcgacgccctgggtcaggcgcaggcagtgctgatggcgtggctgcctggtaccgaaggcggcccggcagtggcggaaaccctgttcggtgatgccaacccgagtgggcgcttaccggtatcatggccgcgcactgtcggtcagcttcctctgacgtacgacaccttaccaggagggcgcccacatattcctggcacccgttggactatgggctacgcagatgaatcgcccttgcctctttttccgtttggctacggtcttagctatacccgcttcgcatacggcgaaccggaaatcgtcactccgcatgtcggcgtcggagaccgctacgatgcgatgttggaagtgcgtgcgtcagttaccaattacggcacgcgtccgggtcgggctgtcgcgcagttgtatgttggacagccggtggccagccgcagtcgtcctagacgcctgttgaagggcgttgctctgcttgatctagccagcggggagaccggcgtggcctcatttcgcgtaccagcccgagttctgggctatcatgaacctgatggtacgttggtggttgaagcgggcacctatctggctcatgttgggggagatgcaatcgccactcgttctgccggctttaccgttgaaacagggtggcgtggtccgccgggctccgatgaagcccgtcgttga

SEQ ID NO: 536 - DNA, 1815 bp, Artificial Sequence
  6xHis UPI00000CF7C8
atgcatcatcatcaccaccacgaaaacctctactttcagggctcgatggttaaccttaaagtgaaaccctacaacctggatgaggaatccattaagtgggtggaagacaccatcaaaaacatgagcatcgaagaaaaaatcggtcagctgttcgtgaacatgggggcgagtcgcgatgaagaatacctcaaaagtgtgttaaacaactatcatataggcgccgtgcgctataatccaggcaaagcagaagaagtgtacgaacagaaccgcatcctacaggaaaacagcaaaatccctctgctgattgcggccaataccgaagcgggtggtaacggcgcttgcactgatggtacttacgtgggcaatgaagttaaaattgccgcgacacaagacccccattatgcctatgaacttggccgtattagcggaattgaagccagcgcgatcggttgcaattggagctttgcgccgattgtagacattaatcgcaactggcgtaatcctatcattagcacccgtacctggtcggcagatgcggatcaaacactggaactgagcttagagtacatgcgtggtattatggaaagcggtatcctcccggcggcgaaacactttcccggggatggcattgacgaacgtgatcagcatctctcatttgccccgaacaccctctcggtagaagagtggaatgcgacctttggcaaagtttacagtggtctgattgaggcaggccttccgtcgattatggcgggacatattgccttacctgaatacgttaaatactttaacccggacgcgaccattaaggaaatgaatatgccggccaccctgagcaaatatatcctgactgacctgctcaaaggccaaatgggtttcaatggacttgtggttactgacgcctcccacatggttgccatgacatcagcgatgaaacgtaaggatatgcttccgacagcaattgcggcgggttccgatttgtttctgtttttcaacgacccagatgaagatttccagtggatgatggaaggctataaaaacggtgtcatcacggaggagcgcttacacgacgcccttacgcgcattttgggactgaaagcgagcttgggcctccataagaaagcaaaaaccgaaatcctgcagccgaaggaagaagcgatggcgaaaattggcctggaggagaacaaaaaagccgcgctggagatcgcggataaagcgattacccttgttaaaaacaacgaggaaatttttccaattagcccggataaaacgaagcgcgtactgctggtgaaagttaagggtttcgacggcggctttggtaaattcttagcactcatgcagggtgcgcaaaaagggcctgtagatatcatgaaggaactgcttgaacaggaaggcttccaagtcgagatttacgaatcgccggtcgacaaaatcatgaaactgccgaaagaagaaatgggtgcggcgattggcaatatttatgcgggaaaacgcccaattgcggagttgacctcgaaatacgatctgattatcaatctggcagatgttggtgcgtccgttgatcagcgtttacaatggccaccgtccaagggcaccccagatattcccttttatgtgaatgagatcccaactatatttattagcctacagtgtccgttccatcttgccgatgttccgcaggtgaagacgtacattaacgcctacgattctaaagagtttaacatcaaggcactggtcgataaaatgatgggtcgctcggagttcaagggtgttagctctgttgatgcattctgtggcttaaaagatacccgctactga

SEQ ID NO: 537 - DNA, 1368 bp, Artificial Sequence
  6xHis UPI0008AEBEA3
atgcaccaccaccaccatcacgaaaatttatattttcagggatcgatgaccaaacgattattcccggatggctttgcgtttggagcagcaacctcggcgtaccagattgaaggagcattcgatgaagatggccgtggcaaaactgcctgggacctgcgtaaccgtgatgaacatgggcgtcctaccggtccagttggggatgtagcatgtgaccactaccatcgttatcgggaggatattgccctgatgcaagaactgggcctgcagacctatcgttttagcataagttgggtgaggatcttcccagacggtatcgggcgtatcaatgacttgggagtcgcgttttatgatgcgttgattgatgcactgctagcggccggaattcgccctgcggttaccatttggcacggagatctgccgctggcactggaaagtgcaggtggttgggagaatcgcgcaaccatcgatgcctatctggattacgcgcgctttctgttcgatcattacggcgatcgtgtcaaaacgtggtatacccataacgaaccttggtgtgcggctttcctgaatgatggtcctctggctcgccagctgaccatcgcacatcatttattgattgcacacgcagcagccgttcaatgttatcgtcgtagcaagtatgcagatggaaagattgggattgtactgaacctatctccgcagtatccggcaagtgccgaccctgccgacgttgcggctgcccgcagcgttgacggatttttgaatcgttggtttcttgatccggtcctgaaagggcgttatcctgcggatatggtagaacgatatgctgggtttggtgctggcgccccgattcgtccgggtgatatggaaaccctgcgctccaatccgtctgatttcctgggtattaatgtgtatagccgcggcgtgcagaaagcagattccgacaacgccttccttggcagcaaggatcgcccggatccgaacagcgtgtttactgaaatgggatgggaagttgcgccggagagcctgtacgatctgctgatggatctggaagcgagctatggcgtggagattcaaattaccgaaaatggtgccgcgtttaaagactccattgttcgcgatggtgtagttcaggatgatgatcgcctggcgtattataaaggaaacctgttgagtgttgctcgcgctattcgtcatggctgtcgtgttacggcctattacgcatggagcttatttgacaattttgagtggggcacctacgaaatgaaatttggcattgtccatattgacccggtgtcacagaaacgcaccgtaaaaaaatcgggcctgttttatcgtgatgttattgcggcgcgcggcttagacgcttga

SEQ ID NO: 538 - DNA, 1404 bp, Artificial Sequence
  6xHis UPI000EC3C979
atgcaccaccatcatcatcacgaaaacctctatttccaggggagcatgcaccgcccgtttatctatggcgttgcaacatcatcgtatcaaattgaaggggggattggcgaacatggagcgggtaccagcaactggacagtgttctcgcagaaaccggggaatatcagtaacttcgagaatggcaacattgcgtgtgatcattaccatctgtgggccgacgatatagatctgatgcacgaaatgggtattcaatcgtaccgcttctcgatctcgtggagccgcattttcccagacaacagcggcaaagtaaatgaagagggcctgctgtattacgaacgcatactccataaactgcagtcgctgaatattgaaccgatgattaccctgtaccattgggatctcccgcaatggttggaagaacgcggcggttggagcaatccggacattatcgagcatttttgcacctatagcctgaccgtcttcaaacgcttcaacaagttctgcgacaaatggatcactcttaatgaaccttgggtcttcctgcataagggctatattactggtgaacatgccccgggtattgaagatttgtctactgcgggccgttcttatgtgaacattctgcgtagccatgtgctggccgcgtctaaaatgcgcagcgaagctccgcacatcgaaatcggcattgcctgcaatgtcagctacattgagccggccactagtaataacgcggatattgtcgccgcaagcaccttcgaatcatatattaatagtctgtttctggacccttggattcgtggctctattcctacggtcgcttggactttgttcaagaaagacctgcccgataaatggctgtcggacgcctcggaattaatcacacagcacgattttgtgggccttaactattacagcaagacgaccatcaagagcaatcagagcgtgttcctgggtgcggagattacgacatcaggtctgccggaaacttcaatgggctgggaaatttatcctgatggcctgacctggatacttaaatgggccttcgacacatacaaactaccgatttacatcactgaaaatggtgcggcatttcatgatgagctactgccaagcggcgatatcgatgacgtcgatcgcattgattattttaagtcgcacctggactcaatgcaaaacgcaatcaaatctggtattccggtgctgggctattatgcctggagtttcctggacaattttgagtgggaagccggctacgaaaagagattcggaatcgtgtatgtagacttcaaaactctccagcggaccatgaaaaagtcaggcgagttctaccgcgattacattaaaaaccataaccggcttatggtcaattttagccagaaaagcaccattcagcttagccagtga

SEQ ID NO: 539 - DNA, 2169 bp, Artificial Sequence
  6xHis UPI000F637E38
atgcatcaccatcatcatcatgaaaacctgtactttcagggcagtatgtcggaaaaaaagatcgaggagataatctcgatgctgacgttggaggagaaaatcgccatgatccacggtaacggcctgttccgtaccgaaggtgtgaaaaggttcaatatcccgccgttgaagatgtccgacggaccaattggcgtgcgtaatgaattcccggatgattcttggatcccgattggtaactccgacgactacgtgacctatctgccgtgcagcctggccttagcttgtacgtggaataccgaactggcctataagtcgggccaggtcttaggatgtgaagcacggggccggggtaaagatgtgatccttggccccggcatcaacattattcgtagccccctgtgcggtcgtaacttcgaatacatgtccgaagatccgtacgtttccggcaaaatggccgtaccgttcattaaaggtgttcaggagaatgacgtgagcgtttgtgtcaagcattttgcagttaataaccaggaaaccgaacgtttgaacgttgaagccattttggacgagcgtacctttcgtgaaatctacttgccggcctttgaaatggctgtgaaggagggtaacgcctatagcataatgtgcgcttacaacaaaatttttggctatcactgtagcaacaatcgtgccctgcttaccgaattacttaaggaagagtgggaatttgatggcatagttatctcggattggagcgccgtgaataacacagaattcgcagcgaacgcagggatggacatcgaaatgagcgtcacgacaaactttgatgagtacttttttgcgaacccgctaattaaagccgtaaaagagggcaaaatcaaagaggaagtgattgatgaaaaaattcggcgcatcctgcgctttatgtacaaaattaatatctttagtgaagaccgcaaaaacgggacatataatttatcagagcatcgtcaagtgaccctggacgttgcccgcgagtctatagtgctgctgaaaaacgaggacaatgtcttgcctctcgaagataaaaagattaaaaaactggctgtcatcggcgagaatgctaactttactcactcaaacggcggaggatcagccgaaattaaggcactgtatgaaatcacaccattgctgggcctgaaaatgcgtctgggtggaaataccgaggtaaaatacgcaaagggctactcccaggatccttctgcgaaggataaactgattgaagaagccgtagaactggcgaaaagttcggacgaggtgatcatcgttggtgggctgaaacacgtcgaagaccagctgaagctggaaaacaacgccctgtcagtggacgaagatgaagttgtgaaacatcgaattgattctgaaggctatgataagagcgacctgatactgccttacgaccaagatgaactgattaagcgtatcctggaggttaataaaaacgccgtgattgttatgctgaccggtagtccggtggatatgtcagaatgggctgatgaagcgaaagcgattgtgcaaacctggtacaatggtatggaaggcggtcgcgctctggcagaggtgattttcggtgatgtcaacccgtcgggtaaactcactgtcaccttcccccgtaaactggaagatagcccggcccacaaacttggtgaatttcccggcaaggagactgtaaactatggcgaaggcatttacgtcggctataggtattttgaaacctacgatataaatccactgttctgcttcggccacggcctgagttataccgattttaaatatatggactttaaaattacaacgaacgagaaagataacgatgtggagatcctggtgaacttcaagatcacgaacaagggtaagaaagcgggcaaagagattgcgcagatctatatatcggatttagaggcgtcggtagaacgtccggccattgaactaaaagcattcgagaaaatcagtctgaaagccggcgaaacgaaagaagttgagatcaaactgaataaaaaaagcttagggttttatgacgttaacaacaagaaatggaaagtagaaaatggggccttcaacattcttgtgggctcgtcaagcaaagacatacgcctgaatagcaaagtgaacatagattcggattatgaattttga

SEQ ID NO: 540 - DNA, 2457 bp, Artificial Sequence
  6xHis UPI000B93B5C9
atgcatcatcaccatcaccatgaaaatctgtacttccagggcagcatgacggaccctatgacgcgcgcgcatggccttctgcgtcagatgaccgtggatgaaaaagcaatgcagctgtcctcggtgtttccccttgccttgttcaccccggagggtattaaccgttcgcgtctggatgcccttttgggtaatggtattggtcatgtgtgcgccctgggcttaattggccacaaagcgccggaagtgttagcgaaagcaacaaatgccattcagcgctacttggtgaccgagactcgcctgaaaatcccagcaatttttcataacgaagccatgagcggtgtagttgccccaggtttcaccgcatttccgaccccgattgctatggcagccacctgggataccgaggctgttgaggaaatgacgggtttgattcgtcgccagctacgctcggttggcctgcgccatgcccttggtcctgtgatggatattgcccgtgatgcccgctggggtcgtatatcggaaacgtttggagaggatgcctacctcgtttccgcaatgtccgtagcgtacacccgcggcctgcaaagccacgacctggtgcgcggcgttgcggctacaggcaaacatttcatcggctacgcggttaccgaaggcggccaaaatatggctgcgacggcgattggagcacgcgaactctacgacgtgtacgcgcgcccgtttgaagctgctattcgcttggcgggcctggcaagtgtgatgccgtcatatagcgaattcgatggtgtgccggtgagcgcctcacatgctgttttaaccgctttgttacgtgataaactggggtttaccggtaccaccatttcagattacgtggcagttggcttcctgcaaactcgtcagcgtgtggcggaaaccgctgaggacgcaggcgtattagcacttatggcggggatggacgtcgaaactcctgaggtctttggttatggagaggtgctggcaaacgcggttcgcaatggtcgcgtggcggagtcagttctagaccgcagcgtcctacgcgtactgcgcgataagttcgcccttggacttttcgatgacccctacgtggcagaagatcccatcgtgattgacaccgtagcccgcgaaggagcggatctttcggcgggtttggctggcagagccgtgacgctcttaaaaaacgacggtgacttactaccattatctcgcgaccttggccgcgttgccgtgattggccctcatgcagatgacgtggcggctggttttagcacctatacttttgcagacgctgttaaaatgtttgaagtgcgtgctacgggaggagaaattgccatggcaggcatggaattaggtggggaggttccgcacgaagctctgatggccatcgcctcggaactgggccctgtgttcgccaccgatcgtcgcgcgtatattgagtcaaactacagtgcagtctcacttgcggatgcggtacgcgaattactcccccatgcggaagtacttgcggtagccggcacgggcgttaccccgacagagccggttgacattggcgccgctattgcagcagcgggtgacgcagatgcagtaattttagcagtgggcggccgttcctcgtggagcggccagcgcacagaaggggaaggctcggatacggcagacatcgccttgccggcgcagcaggttgcgctgattgaggctgtcagcacgcttggcaaaccaacagttactgttttgtctatgggtcgcccatatgcgctcgatgggctcattgatgaactgccggccgtactgaccgcctactacgcaggcccgtaccaggccacggccatcgctgatgcgatttttgggattacgaaccctgcgggcaaattaccatttaccatgccgcgccacgttggccaggtcccgatccaccacgcccaaaaaaccgggtccggttatcgtcgtaccgatgccgatccgcatagtggctatctggatatggcagcgactccgctttttgggtttggacatggcttgtcgtacacgaccttcgcgtatggcccgcttgaactagcttcagataccgtagatgcaggtggtgcagtcacggcggcagtggcgattactaattcaggtcagcggcgcgggagcgatgtagtacagttatatgcagccgataccgcgaccggagttaccttaccggcccagcaactggtgggctttacgcgtgttgatctggaaccgggtgctagtaaaagcgtgaccttcaccttgcctttgagcgtgcttgcgtacacaggtgtgagcggcgaattggtggttgagcccggtccggtagagttatctgttgggactagctcgacggatatacgtgcgcgagccactgtgaccgtaaccggcggcacccgcacatttcgcggcgatgaacgcgctttcttctctagcgtggctgtgggcgcatga

SEQ ID NO: 541 - DNA, 1740 bp, Artificial Sequence
  6xHis UPI000F6EFA71
atgcatcatcaccaccatcacgaaaacctgtacttccagggctctatgattgacctgactaccaaaccgttcaacctgtctcagaacgaaatcgattacgttctggaacaagtgaaacagatgaccaccagcgaaaaaatcgggcaactgttctttgtgattggtcaggacgagaaaatggttgatctggatgagttcattgataaatacaaaccggggggcatgatgtttcgcccggcaccggccgccgatattaaacgccagattaagcagattcaaaaccactccaaatatcccctgtttttcgcggctaatttagaatccggcgggaacggcattattagcgaagggacctggctgggtatgcctatgcagatggccgccaccgataataccgatgcggcgttccagcttggtaatgttgcaggctacgaagctaatcaagttgggtgcaatatgtcgttcgcaccgatcgtggatattgacaacaattttcgtaacccaatcactaatacgcgcacctacggttccgatccgaaacgcgtgttaaaaatggcgcaggcgcagcgcaaagggctggaagaaaaccatgttattcccgtaattaaacactttcctggcgacggtgtggatgaacgcgatcagcatctcctgtcaagcattaacagtcttagtgcggaggactggtcctcgacgtacggtcacatttacaagactttcatcgaccaaggcattagcaccatcatgattggccatatctatcagccggcctgggaacgtaaattacagaagggaattgcggataaagacctacgtccggcatcagcctcaaaactgcttatcaacggtctactgcgtaaggagctgggattcaatggactggctatgactgatgcaaccgcaatggtaggctacaacgtgattctgccgcggaaggaattattaccggcaaccattaacgcaggggtcgatatgatcctgtttaataagaatattgatgaagactacaaggcgattaccgaagccgtggaaacgggccttatcagcgaagaacgtttgaatgaggcagtcacgcgaattctggcaaccaaagtagcgcagaacattctgacgaccgatggcaaactgggcattgacatcccggaaactctggacctgaaaagcgatgagcatctgaccatcgccgagaatatcgccaaacaaagcgttaccctggtcaaagaccgtgaccagctgctgccaattagtccggaaaaaacgcctcgtgttcgtcttgtggttctgggtgactccgacgacggaggttttaaggaaggcggcaaagtgtcagacttgtttaaagaggaactggagaaagcgggattcgaagttacaccgttccagatggatttccacgaaatgttcgaagaaggggtctgcgatctgaaggaaaaattcgatttggccttttacgtggcaaacgttgaaacagcgtccaaccagactaccacccgcttggattggatccatttaatggctgcaaatgcaccttggttcgcaaaagccattccgaccgtgtttgtaagtacggctaacccgtaccatctcttcgatgtcccgtacttgtcgacgtacatcaacgcctataccggtaacaccgcaaatgtgaaggcgatcattcgtaaaatgacgtgccaagaagcctttgagggaatcaaccctgtggacccgacatgcggcgactttaatgcggccctgtga

SEQ ID NO: 542 - DNA, 1401 bp, Artificial Sequence
  6xHis UPI0000EB54CC
atgcatcatcaccaccaccacgaaaatttatacttccaggggtctatggcgatccacaaaaaagatttgaaacgcgaagaatacgaaaagcattataagattagcaaccagcaaattgccgatgctattgcggccaaagacgcgagcgattatcccaagcgccgtggcatcgatttttatcaccgttacaagcatgatatggcgctgttcgcggaaatgaacttcaaggtattacgcgtgagcattgcatggacacgcatctatccgaacggtatcgaagaacagcctaatgaagaaggtctgcgcttttatgacgaactctttgatgagatgcacaagaacggaattgaaccgctggtgaccttgagccactacgaaatgcctatttacctggtgaacaactatggtgggtggagcagccgcaaaaccgtggatctgtttgaaaagttttcgaccaccgtgcttgaacgctatcagcataaagtgaaatactggttgacgtttaatgagatcgacagcctcattcgccatccgtttaccagtggcggcattgtgacagaacgcctgccggccgatgaaattgaatctgtaatttatcaggcgttacaccatcagtttgttgcgagcgcccttgccgtgaaacattgcaaacgtatttccccggacgccaagattgggtgcatgctgacccgcctattgacctatccggaatcgtgtgcgccggaggacgtgttactggcgtatcaggaaaaccagctgaactactttttctcagacgtccagattcgtgggcgttatccgcgtcacatgacccggagatttgccgaaaaagggattaatattgttatgcagcctggagacgaggaaatccttcagcagcataccgtggacttcctgtctttcagctactatatgagcttagttaccagcgtgaatgccgataaaatggacaaagtaggagggaacattgctggcggtgtgaaaaacccgtacctgaagacgaccgactgggattggcagattgatcctgttggcctgcgtattgccctgaacgatatgtacgaccgttaccaaatacccctgttcgtcgttgagaatggcatgggtgcggttgataagattgataaagacaaccagatcaacgatgactaccgtattgagttcttccgcagccatcttaaagagatgaaagaagcggtgaaagacggtgtagagctgatgggctatacaagctgggcaccgattgatttgatttctgcgagcaccagcgagatgaataaacgctacggtttcatctatgtggaccaggataacgacggtaatggcaccttggaccgctatcgcaaaaagtcgttctattggtatcagaaagtgatcgaaaccaacggcgaatacctgtga

SEQ ID NO: 543 - DNA, 2535 bp, Artificial Sequence
  6xHis UPI0000ED8A80
atgcatcatcatcaccaccatgagaatctgtattttcaaggatcaatgtggagcgaattgcgcgcagtgacagttgtgggtctgctgtcattgggagtgtcgtgcggccgttctgtggatgcggaaagtggagcgcagcagagtggcttgccgtggatgaatacgagcttgacggccgaacagcgcgcagacctcttaattcctcaaatgactctggaacagaaagtgcaacagattagcaacgatacgcgtcctgcggagaaggacgaaaaccgtccgccgggatgcgaattcacacaaattgcccgtcacattcagggtatccccgaattggcgattcctaccgtacgtatgattaacggcggtacgggtgttcgcggcgggagttgtcttcccgaaccggtcgcgacagcagttccgtcaacccctgcctcagccgccactttcaacccggaacttaaccgtcagctgggagaagtactcggtgccgaagcccgctcggttggccatcaggttatgctggcgccgggtatgaatttacatcgtcacccgttcggaggacgtaactacgaatatcagtcggaggatccttacctaagtggcgttatggcgaccgaacagatcaagggtattcaagcacacggcattcatgccaacgctaaacatttcgccgccaacgaacaagagagtcaacgtcgtcaaatggcaaccgtcgttccgccgcgtgcgttacatgaactgtacctcttaccgtttgagatgtctgtacgcgacgcgcagccggcttcgattatgtgcgcctttcccgaaattaatggtgttagcgcgtgctctaacgaagacctgctgaaaaccacccttcgggaacgttggggtttccagggctatgtgatgagcgatcgccgtgcggttcatgacgttgcaccttcaataaaagcgggcgtggattgggaactatcacatattaccccgcttcattacagcctggaaccgcagcgcggccaacgaggcaatccaggcagtgaaggaattcgcgcggcgttagacgcaggcacgattacggtcggtgacattgaccaaatgttgcgccgtcgctatgtgcagatgttcaaatttggtcatttcgacactgactttgacgccttatatggcagcccggtggacttcgttgcacatgcagcggttgcgcgtgaattagcggaacaaggtattgttttgttaaagaacgagcagggtttcctgccgctggagccaaaagaaattagatcgattgcactgataggagcggaatggtttgctggccaagcgaaactgcctccgcgttctatccgtgccgataatgtcggcgtggtggccccgttcaccgtttcaccgcaagaaggtctggagcatgtcctgattaccttgggctcaccagccaccgtaacgtatgacagtgcgggaggcactggaaaaaaggaagatcgcgaacgtgccatcgaactcgctcgcaaaagtgacgttgtaatcgttatggtaggcgataacccacatgaattgtgcgatcgtgaaacactgagtttgccagtgattccgcccgccgatcctaacttttgtgcgtacgacgaactcgaagaaggagaatatgtgctgcagcgcccggaacgaggcgaaggaacccaacaggaaatgctcatggctgaactgtccgcagatcctgaagttgccaagaaaaccgtggtagtgctgaagacggaaggcatggtattgatgccttggcttgataaagtacccgcgctggtggaagcctggtaccccggtcaatcggatggactggccgtagcgaacattttattcggcctgcgtaacccaagtggcaagctcccgatgaccttcggaaattcagaacgtgaagcggcccatgagacaaccgcccagtttcctggtttatgggttggaccaccgcattggctagcaacgccaagcaattccaatgaacccggcggcgatcccagccctaccttagagggccagaaacggttcagcgcccagtattctgaagggctgcaggtcggctatcgttggtacgaagcaaataacgttaaaccagttttcccgtttggtttcggtctaagctacacgacctttgcgtatgcggacttgtccgtgcagaccgttgctggtccgcaaggccaaaatgtcttaaacgttagctatcgtattaccaatacgggcacgcgtcaaggcgccgaagcgtcccaggtatatctgacccttcccccggaggcgggtcagccgagcaaacgtctggtgggctttcaaaaagtcgatttgatgccaggcgaatcgcgtcaggttaccgttaccgtggacgaaagcgcagcgaaccatcctctttcctactgggtgccagagaaagacgtgccggaacctgggtggggcagaggcgaatggcgtaccgccccgggatcatataccgtgcacgtgggaaccagctcagccgaaacgccgttgcagcaggcggtaagtgtggccgcaggtgtgccccgccgttga

SEQ ID NO: 544 - DNA, 1917 bp, Artificial Sequence
  6xHis UPI00018E7D70
atgcatcaccaccaccatcatgaaaatctgtattttcagggtagcatgcagagccagaaagtgcagacatgtgggaagcattacattggcaatgaacaagagacgcaacgcaatccgaccacgtatccaaacgggaccaccaaacaagaatcggtaagcagtaatattgacgatcgcacgattcacgaactctatctgtggccgttttacgaaggcgttaaagccggcatggcctcggtgatgtgctcttataaccgcattaatggcacctacgcatgccaaaacagcaagaccctcaatggtatactcaaagaggagctgggtttccaaggttatgtggttagcgattggggcgggacccactcgggtttagattctgctttagcaggtctggacatggatatgccgggcgcaattgaatggggtagcgacagcggcaacaactcatattttggtaacaacattacgatgatgatccagaacggtagcctcgcggaatctcggcttgacgatatggtcaagcgcatcttgaccccctattactttttcgaccaagagaactatccgacgattgatcttgacaccgcgcagctgagcaaagaactttatggatcggacattccgtcgttttcacaccctttcaacctgggcaactctaccgacattaaccgtgatgttcgcggcaatcacaaggatctgatccgcgaaattggaagtgcatcggcggtcctgctgaaaaacaccaataacacactgccgctgccgaaagatattaagcgcattagtgtgtttggcaacgatgcggcggacgtgtcaggaggcccgtatgatccgtccaacacgaatggcgttttatcaatgggagggggatctggcgcgggccgcctgacacatttagtggcgccgctggaagcgatcaaacagaacaacccgcaggcactgattcagtacgttacagataatgccctgttgacgcaacagccgagcgaaacattatacaccgtctacccggctgcggatgcctgtctggtctttctgaaatcattcgccacggaaggggcggaccgtttatcattcctagccgatgacaattctactgcagtcgtcgatctggtcaccggttctggcacttgccccaatactgtggttattctccactccgctggcgccaacttgatgccgtgggcagataacgaaaatgtcacggccatcatcgcagcccacttaccgggcgaacaggcaggcaacgcgattgtggatgtattatttggccaggtgaatccgtctggcaaactgccgtacaccattgcctataatgagagtgactataacgccccagtggtaaatttcaccaacgtggataataatgacccaaacctttggcaaagcaacttcactgaaggcctgcttatcgactatcgccatttcgactacaataacattaccccgcgctatgaattcggctttggcttaagctacacgaacttcagcatctcggatctgcagattcgttcagcgagcaatggcaatgtgagtcctacaccgcaggccctgaatggcactattccgcctccgggcggcaaccccgatctgtatactgtgctggcatcggtgcaggtgaccgtcagcaacaccggcgatatgccaggacgcgccgtgccgcagatttacttgggctttccggactccaccaataccagtagcccgacccctgtgaaagttctacgtggctttgaccgcactaaaatcttgcagactagccagtcagtgacgatgagcttcgatctgcgtcgtatggatgtctcgtcttgggataccggccgccaagagtgggtgattccggcgggtgaattcatggttcttgccggttggtcgtcacgagatttaccgttacggggcgagttgcagttagtttga

SEQ ID NO: 545 - DNA, 2070 bp, Artificial Sequence
  6xHis UPI000A2E3FAA
atgcatcaccatcaccatcacgaaaatctgtattttcagggctccatgtgtctacaggataacgaaaatggtgtacgcggcaccgatcagagctcaggcttcccaagccagctgagtattggggccagttggaaccggtcactcgcactggaacgtgcacaattccttggccgtgaatttaaagccagcggcgccaatgtcgtattaggtcccgttggcggcccaatcggacgtattgctcgtggtggtgggatcggtcgtgccattggtttttcgaatgatccttatctgtcgggtcagctgatagcaccgacggtcaccggcatccaagaaagcgtgattgcgtgtgtgaaacactggttattcaatgagcaggaaacgaatcgcaacccgttcgccttcggttttctaggttatttcggaaaccaggcagtgtctagcaacgtagacgatcgtaccacgcacgaactctatatgtggccttttcaggatgcgttggcagcgggggctggaagtgtgatgtgcagttatcagcgcgcaaacaattcttacggttgccagaacagcaaactgatgaacggcctgcttaagggtgaactgggctttcagggttttgtggtgagcgattggtacgccgtccatacgggcatcgcagcaaatgaagcgggtttggatatggtcatgccgtcaagctcctttttgactccggaatcgttagccgaagcggttaataatggctcagtgagcgctgaacgtttaactgaccaggccacgcgtattcttgccgcatggtatcgcttcgcagaactggaagaaccgggcctgaaccaacacgaggagaccaatgcgcaggccgaagatgtcgagagtaccttattgcaaggcgccattgaaggacatgttctcgtgaagaacacggagggcgcgcttcccttagacccttcgtcgacccacacgcttaatttgtttggttacgatgcaattggcggattgaatacctctgcagaagggtttctcctgtatgatatgggccttgccaacacccaaaagtatgaggacgggcgtatcttcacctttattgactactacctgcaggccggcgatatcttacctgatccgcatgccggtccgcaaattgctctggatggaaccattctgagcggcggcggatcgggagcagttaaagtagcatggagcatttcggctcacgatgctttggccagtcgcgcccgtacctggaatcagaccctgcatacccaatttgtggatcagaaacctaccgttaaagcgccggacgcaccttgtatcgtgatgattaacgcgcagtccagcgagggatgggatcgctccggcattcgcgatgaatattcggataccctggtccaaaatgtcgccagccagtgtaaaaacaccatcgttgtgatccataatgcaggtgtgcgtctggtggatagctggattgaaaacccaaatgtgaccgccgtcattttcgcgcatgtgccgggccagatgaatggcgaagcgttagcggcgattctgtacggcgaacagtcgccgagcggtcggttaccgtatacccattttattcaacaggacattacgccgcgctttcctttcggctacggactgacctacaccaatttcacgtacagtaatttaagcatccgtcttgctgaaggcgcgaccacatcccctttgccgccggctttccagccttcgaatccaaacaccacgactaccctgccacagggaggtaacccgagcctgtttgatcatttagctaccatctcagtgcagattaccaactcaggctctgttacggcggcagaagtggcgcagctgtatattgaggtagcgtcaagcgatctgccgctcgccctgcgcggttttgaaaagaaactgctgagcccgggagagaccgaaacctttagcttcccgctgcgccgaaaagacttgtcggtgtgggatgtaggccagcaagagtgggtgctaagcaaaggtcctcatggagttcgcgtaggcaaatcagtgggggaaatccttgttgaaggcaccttagaactcaactga

SEQ ID NO: 546 - DNA, 1362 bp, Artificial Sequence
  6xHis UPI000C529025
atgcaccatcaccaccaccatgaaaatctgtacttccagggttcgatggtgaagaaaagcgatttcagcgataagtttatctggggctcggcgattgccgcctatcaaactgaaggtgcccatgataaagacggtaaaggcgaatcaatttgggatcgcttctgccagcaggaaggagtgatttgcgatggaactgatgggaaggtggcgtgcgactcatatcatctctatgaaaccgacatccgtcttatggcagagatgggactgaaaaacttccgcttctctatttgctggccgcgcattattcccgatggtacgggtgaagttaacgaaaaaggaattgacttttatagccgctacatcgacaccttactggcgaacggaatcgagccttgggtgactctgtatcactgggatttaccgcaagccctgcaagataagggtggttgggaaaatcctgagtgtgtcgagtggtttaaatactactgtcaagtgttccacgaccacttcggtgaccgcgtcaaaaacattgtgatcttcaacgaaccgtccattagtagctttttcggttacggcaccggcttccacgcaccgggcattaaatctgagcaggcgtatctcagggcggcgcataatattaaccgcacgattcacgatgcatactttttcctgaaaagccttaaagccgactaccatctgggcgctagctatacgacgccgttaattaaaacggcattcgatgatcagaaagcggtggaaatcttcgacagcctctggaacagaaattaccttgatccggtgatgaccggcgaatatccggacgttttcaaagacgcgtttaaagaagcgaacccggacacaattggggccgaactcaaaacgcctcttgactttattggcttccagtactactctcccatttacacgaaagcaacgaaagaaaacgacgagtactccttcttcggcgtttggttcagcgaaaccccggatactttcgataagacctcaatgggttggggtatttccccggaatctctggaagagttcatcaacgactttcatgcacgctatggcaaagaaatgccgattattgtcaccgagaacggttgtgcctacgaagataaagtaactgacggcaaggttaatgacgatctgcgtatcgactatgtcgaaaaacatctggaaatttttgcgaaatactctgataccgtgaagggttacttctactggagcttgctggacaactttgaatgggccgatggctacggaccgcgctttggcctgattcatgtggattatgaatcgctggtgcggaccccaaaaaaatcttatttttggtaccgcgacctgattagtgaatga

SEQ ID NO: 547 - DNA, 2688 bp, Artificial Sequence
  6xHis UPI000CE6B996
atgcatcaccatcatcatcatgagaatctgtatttccagggctcaatgaaaagccgtatccgtatcggtttgcaagtcgccttcatcctggcattgattttagtccgtgccgttgcacagaccccgggcagtgctgtttatctggatccgtcccaacccatcaatgtacgcgtcgatgatctgataaagcgtatgaccgttgaacaaaaagctacgcagcttgtaaaccaagcccgcgccattccggatttaaaagttccggcgtatgattggtggagtgaagcgttacatggggtagcgaatgcgggcaccgcgaccgtttttccggaaccggtgggtttggcagccacatttgatgattctctcattcacgacatggcgatcgtcatcggcaccgaagcacgcgcaaaacacaaccaagcagtacgtgctggccggcgcgatatcatggaaggcctggatttttggtccccgaatattaacatttttcgcgatcccagatggggccgcggacaggaaacctatggtgaagatcctttcctgaccggtcgcatgggcgttgcattcgtaacaggactgcaaggtgatgaccctaaatactttcgcgtcattagcactccaaaacactttgctgtgcatagtgggcctgagaccagccgccacacgatcgatgttcagatttcaaagcacgatatggaagatacctacctgccagcgtttcgcgcggccgtgattgaaggtaaagctgaatcagtgatgtgtgcctataatcgcgtgaatggccagccggcgtgtgccaatacatttttattaaaagatcagctgcgcggcgcgtggaaatttaacggctacgttgtgtctgactgtgatgctattgttgatgtgttcgaaggacataaatttgtgaaatcacaggcagaagccgcagcggtcagtttaaagacaggcatggataatgaatgtgccgacttctttaccatcacgaaagatgatcatgattacaaaccttacgtagatgcagttaagcagggattactgacggaggccgacctggatgttgccttgcgccgcttatttacggcgcgcatgcgactgggtatgtttgatccgccagaaatggtaccgtatgcgcaaaccccggattcggaaatcgatagtgccccacatcgcgaactggccctgaagatcgcacgcgagagcatggtgctgctgaaggacgatggcgtgctgcccttcgcagcgagtgttaaaaaaattttagtagtaggtcctttagcagatcagactggtgtcctgcatggtaactattccggaactgccagccatgcggtcactgcggttgaaggcattcgcaagcaatttggcggtgctcaggtttcgttcgaggcaggcaccaattttctgcgcgaacatccggtgattccgacctcagcgctcagtaccgatgacgggaagcctggactccgtggtgaatactttagcggtgaactgagcggaactccgcaggttgtacgcgtagatccctatgtagatctgcaattgtctcacccggatgcccatgccctgcccctgccgaccggtatgaaagacttttcggtccgctggacgggctttctgactcctgccgagagcggcacgtatcaggttggattaatgggatcgatgcagagactgtggctcgatggcaaattgatcgttgatgacggcatcctgcacgacccaaaccctcagctggcgacagttcagctggccaaagggcatctgtatgctattaagattgaatatcaagcaggcgggcgtaccaccaagttgatttggatgtcaacgtcagcagacccgctggtagaagcggttagcgccgcccgtcaagcagatgttgttgttgccgtcgtgggtataacgagcaagttagagggcgaggagatgaaagtggacgtaccgggttttaaaggcggcgatcgaacctccttgaacctgccggccgaagaagaagccttgctcggggcccttaaaggagccggaaaacctctggtggtggttctgatgaacggaagcgccctggcggtaaattgggcgaacgatcacgcaaacgcgattttagaggcctggtactcaggagaggaaggtggaaccgcaattgctcagacgttagcgggtgcgaataatccgggcggccgcttgccggtcactttctataaaggagtcgaacagctgccggaatttgaagactacgccatgaaaaaccgtacctaccgttatttcacgggcgaaccgctgtatccttttggttatggcttgacctacaccagctttgaatatagtggcatgaagctcagcaacccgcaactccaagctggcaacccacttgatgtcgaagtcgatgtcaaaaataccggtaaacgtgacggtgaggaggtggcagaactgtatataagctttccgaaactcccgggcgctccgtggcgtgcattgcgtgggtttactcgtgtccatgtgaaagcgggagaacaaaagcacgtgaaactgaccctgtctccgcgggacctcagttatgtgaacgaagccggtgaccggctggtatcgaccggtgactaccttataaccgttggtggcggtcaacctggtaccggtgcgcctcatgcggagagtcatttaatgattcagggcgaacagaaactaccggaatga

SEQ ID NO: 548 - DNA, 1272 bp, Artificial Sequence
  6xHis UPI000DA3A972
atgcaccaccatcaccatcatgagaacctgtattttcagggaagcatggatctgtctaatattcgtattggcaccgccagtgcaggccttcagattgaaggcagtccccgtcctaacaattggtcggactgggttgccaaggacggtaccaccccgcatccgacgaccgatcattggcatcgatggcaagaagataaccaactgatgagcgatttgggcctacaaatagctcgcgtaggcgtggagtggtcacgtgtagaaccggaaccgggccgttatgaccacgatgccttgcaacgttatcgcgaagaatttctggatttgcgcgagcgcggtattgaaccgctggttaccctacatcatttcggccaccctgcgtggttcgaggcgaacggagcctttacccgcgaagcaaatgtggaaattttcctgcgttatgttgacgtggtgctggatcatttaggcgatgtggtccgtgattggattaccattaatgaacctaatgtgtttgcgactgaagcttatttgttcggcagcactcccccaggccgtggaggactgccaaaagttcgtccctgtttacgcaatatggcagcagcgcatctgctggcataccaacgcattcactcccgcctggataatccgcgtgttacctttgcccatcatcgccgtgtatttgccccgatgaacccccgtaatccggtacatcgcttattaaccccgcttgtagaatggctgttccagggggcgattgaacccgcgttttttgaagggcgctttcaccctgttctgggacgtccgagcttagatctgccgtcaggcgaagtgttcgccgatgcggtagccatcaattattatagtcgcaccgctgttcgtggcttctttgatgcgacctttccgggcacgccaaccaacgaccttggctgggaaatttatccgcccggtattgcggaagtgtcggctgatctcgcaaaacgctatcaactgcctgtgtggattacagaaaacggaactgcggatgcagatgaacgattccgctgcgcatttattctcgatcacctggctgaactgtcgcgtctgccagaagtgaaacgatattaccactggtgttttgtggataactgggaatggtcagagggcatggcacagaagtttggcgttgttgatgttaatcgccaggtaaaaccagcaggccgcctgttgcaggcgctgattcgtgaaggtgcgattactccggaaattgatgctgaatttcgagaaaaaggccactga

SEQ ID NO: 549 - DNA, 1461 bp, Artificial Sequence
  6xHis UPI000E8D37A1
atgcatcatcaccaccaccatgaaaatctgtatttccagggatctatgtatcgcttcccggattcttttttatggggttccgccaccgcatcgtaccaagccgaaggcgcgtacttagaagatggcaaaggcttatcaatttgggacgtgtttacccatagcgaagagagcaaatcgaaaaacgtctgtaacggggatgttgcgtccgatcactaccatcgttacaaggaagacattaaatacatggccgaatgtggccagaaaagctatcgctttagcattagctggccacgtattttaccgaacggtcgcggcaaaattaacccgaagggcattgaattttattccaatctgattgatgaactcctgaagaacaacattgagccgtttgtgaccatttatcactgggacttaccgcaagccttacaggatattggcggatgggagaatcgtgagaccagctacgcgttcaaagactttgcgaagattctgttccagaaactgggccataaagtgaaactgtgggtgacctttaacgaaccgaggttctttacctatagcggataccttattggtaactatccgccgtcatacaaagatcctcagaagacgattcgcgccgcgtacaatgtgatgttagccaacgcgctggcgatcaaggagtttcgcagcatgaatatagatggccaaatcgggattgtccatagctttaccccggtgtattcagtggacgattcagagggtagtcgtatcgccgcccgcaatgcagacaactattttaataactgggtcctggacacggcgattaacggcgaatttccgcaagatcttattcagaaacttagcaaagattatgatctgagcttcattgataacaccgacctgaacatcattaagagcaacactgtggatttcgtgggtctaaattattatgcacgcgccctggtgaaagaatatacgaccggcgaaaccgtgctgcgcgtcaacaacaagggcaacaaaatgaaaggctctagcaagattgtgatcaagaattggtttgagatgatacaagacccgaaaagcaagttcacggattgggatacggaaatttatcctcgcggtctatatgatggcctgaagatggtcgacaagcgctacaaccacattccgatctatatcagtgaaaacggccttggaatgatcgataatctggtcgatggtcgtatcaacgatgatccacgcattgagttcctcaaaatgcacctgaaggagatttacaacgccatatccgacggcgttgatgtgcgtggctattacgtttggagtagctttgatctgtacagttggatcaatgggtatgataaacgctacggtctgatctacgtggactacaaaaacaacaataagcggattccgaaaaaatcgtattactggtataaagacgtaattgcgtcacacggcctgacgctgaacgaatga

SEQ ID NO: 550 - DNA, 1398 bp, Artificial Sequence
  6xHis UPI000748C096
atgcatcaccatcatcatcacgaaaatctgtatttccaaggctcaatgtcgcagatcaacttcccgaatgactttatttggggcgctgcgacggccagctaccagatcgaaggcgcatgggacgaggatggtaaaggcgaatcgatttgggatagattcagccaccagccatatcatatttttaacggtgatacgggtgacatcgcctgtgaccattaccatcagatgcctcaggacgtcgcacttatgaaagaactgggcttggcgagctaccgttttagcattaattggccacgtatcttgccgggcggcattggtcgcgttgaaccgcgtggtcttgatttttacgatcgtctggttgacgaactgcttgaggccggaattaaaccgatggccactctgaaccattgggatttcccgcaggcacttgaggataaaggaggttggaccaaccgagattctgtcgactggttcacggattacgcccgcattctctttgaacgtctgggtgatcgtgtaccgtattgggccacccataatgaaccttttgtaatcgcgatgatgggctacgcgtttggtgtttttgcgccaggtatcgcatcttacccgcaagcgttccaggtaactcaccacttgcacatggcgcacggtaaaactgtgcagctttatcggcaaatggggcttactgggcagatcggtattgtactgaacctgagcacctaccaacctaaaactaatcgtccggaagatttggatgccgcgaagcgtatggaagacatgaacaataacctgtacctggacccgatctttaaaggcaaatatcccgaggacctgattgcgtggatcgataaaagtcggccggagattcgtgacggggacatgacccttattagccagccaattgacttcctggggattaactattacacggcacagatcgtatcattcagtcctaacggctacatgaaattcgaagcgcagacccgtgtggagccaggctggggcatcacctacaaaggttggggtatttgcccgagccagctgaaatcgctgctgctgcatctcaaagaagactacggcaatccgccgatgtacattacggaaaacggcacgaccctaaatgagccggtggacgaaacaggttacgttaatgaccagggccgtatcaactatctgcgtgctcactttcaagcagcgcatcaagctatccaagaaggtgcgaacctgaagggttattttatctggagcctgatggataactttgaatgggcctctggctacgatcaacgctttggtctgctgaatgtagactttaacgatccggcacgtaaacgcactccgaaagcgagtttttactggtaccgagatgtgattaaaaccaacggcttcaccaactga

SEQ ID NO: 551 - DNA, 2334 bp, Artificial Sequence
  6xHis UPI000FF41956
atgcaccatcatcatcatcacgaaaatttatattttcagggtagcatgtcaaaaagtttcctagaagcccatgttccggaccttgtgaaaaagctgaaagtcgaagaaaaagtagctctgctgtctgccccgaactggtggaacacaaccccggtggtacgtcttggcatcccaagcattcgtatgagtgacggcccgaatggcgtgcgtggcagcagccacttcgtaccgaccccggcccaatgtatgccatgtgcgaccgccctagcgagtaccttcgatcctggactggttaaacgtgtcggcgattttcttgcgcaggaggcgaaactgaaaagctctgttattctgttagcgccgacatgcaacattcaacgttcgccgcttgggggccgcgcgtttgagagcttcagcgaagatccacacttatctggcacattagcagccgcctacgtagatggtctgcagtcgcagggtgttgcagcgacaattaaacattttgtggcgaacgatcaggaagatgaacgaaccgcggcggatagcataatgtccgcacgtgcattacgggaaatttatctgtatccttttatgctcgcgcagaaacatgcgcagccagcagcattcatgaccagctacgggcgcttaaatggcacccactgctctgagaaccgtgaactgctgactgatattctgcgtaaggaatggaactttggtggcattgtgatgagcgattggttcggcacgtatggcgtggatctggcagtaaatgcgggccttgacctggaaatgccgggtcccccgcgttggcgtacattgagcctggttttacactgtctaagttcaaaaaaacttacaatggcgactatagatgagcgcgtgaccagtctactgaccttcatccagcggcaagcgcgcaagaacattgatatcgtgttcggcgacggtatcgaacgctcccgtgatacaccggagtcacgccgcttctgccgtcagatcgcagccgaaggtgttgtgctcttaaagaaccgtggtaacattcttcccttaacctgcaagaatattgccgtcatcggtccgaatgtaaaggaacgtgtgattagcggcggtggctcagcagcactgaaaccgacctacgccgtaaccccgtgggagggaattgcagacggtgcaccagcgggtaccacaattcattatcatattggttgttatgggcacaaataccttcctacccttgagtcgaacctgaggactccgcgtggtgatgccggttggctctgtacgtttttcgctcatgacgaacacggcgaaatctcgtatccggttcaacagtttattctaaatgatacgcgcgtgaaattaaacgatttcctgccccagggtcttaccccgacctggtcgatcaagttagaaggtaagttgactctggataaaacctgccgctttgaattcggtttaactgtagccggccgtgcaaaactatgggtggatggttcactcttgattgataactggagtaaacagattcctggcgatttcttctacggccaggggacgattgaggagaaagccagcgtgaacgtgaaggccgggaaacccgttgacattttcgtcctgtataccaatacccctccacctgatggggacgatgaaaacggcgaaggccgtcttagccagccggcgttgatgcgtggagtgcgtctcggaggatgtgaaaaaattgatgaagaagacgcaattgccgaagccgttagtctcgccttacaagccgatgccgttattttagtgggcggattatcgccagaatgggaatccgaaggctttgaccgaccatcgctgcgccttccgggtcgtcaggatgaactgttcacccgtgtagcgaatgcgaatcctaataccattgtgtgtatccaggccggctccgcagtatcgatgccttgggtaaaagaagtaagtggactgttgcaggcatggtattccggcaacgaagccggaaacgccattgctgatgtgttgttcggtaaagtgaatccgtcggcgcgtttacctcttacctttccgtcgcgcatagaagacgttccggcctatctgaatcacaaaagcgaaagtggccggatccactaccgagaagatctgtttgtcggatacaaacattaccaggctcgcaacatcacaccgttattcccgtttggatttggcctgtcgtacacgcgttttagctattcgaatctggttatttcggtgaagccgtatagcgatgtggacttactgcatttaaacctcacagttacagttagtgaggaagcccacggtcagcgtgcctctccagccaggtga

SEQ ID NO: 552 - DNA, 2625 bp, Artificial Sequence
  6xHis UPI000F7105D4
atgcaccatcaccaccatcatgaaaatctgtatttccagggttcaatgtctgatctgtggcatggggaagaacacgccccgggcgaatccgatacggcgatgaccgacgctacccgtacctcaggtcgcgccgcacgcttaaccgagttagtggaccgtctttctctggccgaaaaagtgcatctgctcacgggtgagacggcctttacattaccgggaaatgaacgcattggccttgctgcgttggcgttcagtgatgggccgacgggcgtgcgtggtttaacgttcgtgggtggcgatgcagttgccctgtttccgagcgctacgctcattgccggcgcattcgatgatgggatcgcggaagaagttggccgtatgcttgctgaagaagcccagcgccagcatatacatgtagtactgggcccgaccattaacctccatcgcacgcctctcggaggtcgcctgtttgaagcctactctgaagacccgtatctcaccggccgtaccgctgcagcctacgtgcgcggtatgcaggaacgtgggacggccgcttgtttgaaacatctggtcgcgaacgaaagcgaaaccctccgaaattttatggattcccgcgttccagaaactgcactacgcgaactgtatctgctcccgtttgaaatggcggtgcaggatgcaggtgcttggagcatgatggccgcgtacaatgatgttaacggcgtggccgcaaccgaacacgatcatgtacagaatggtatcgtaaaaggtgaatgggcgtgggatggactaataatgagcgattggttcgcaacaaaacgaactgccgcaagcgcaagtggcggtctggaccttgtcatgccaggcccgggaggtccgtggggcgagcgtctggtaacggcagtacgcgctggagaagtggctgaagaaaccattgatgatcatgtgctgcgcctgttgcatctcgcagagcgtgttggtggcctaacgcctcctggacgccagtcccgaccgtgggcgcaggacttaccagcagtagacagcccccaacgcaaagaacagttgcgccgtatagccgtgcggggcatgactgttgtcgcaaatgacggtgtactccctctggctgtggagggtgacgccggtcaggatgtagccttaattggtcgccacgccatcgacacagttgatatgggaggaggctcggcagttgtcaacccgccatatttaagcacaattgccgaaggtctggcggcgctgttaggcgaccgtgtgcgcgttgctgacggcccagccgtacgtacccgtcctgtaccggcggatccagcattcctgaccgatccggcaaccggaacacccggcatgcaggttgttctgctgggtgcggacggtaccgaactgacccgctatcactctgatagcccggccattagtctggatggacacgatgatctcggcgaagtcccagctacggccgttttgaccaccattttagcgaacgatgcgggtccagtacgcctgggtgctgtaggcgcgggacgttgggatctcgtggcggaaggacaagagctgagtgcggaattacgtctggaaggccaggacccgggtgaagcaatgcttcgcccgccggcctttgcggaaacggtcgagttaccggccgccgccacgttgaccgcgaccgttgccccggcaccggtagattggagagaagtattgcttggcgacccgggtttaggtttagcggaggaatctcaccttctgcagatgacaacggcgggcaaaactgccctcgtcgccgcaccagctccacgtccggatgacgatttgctggcagccgccgaggccgcggcggtagccgccggcaccgcggtagtggttgtcgggctgacggaggagcaggagacagaagcggcagataaaaccacacttgtgcttcctggccgtcaagacgaattagtacgtagagtagccacggccgctgagcggaccgtggtcgttgttaatgcggctaccccggttctgatgccgtggttggatcaggtcgatgcggtgttagtggcgggcctgccgggacaggaaggtggtcatgcggtcgcagctgccttaacgggcgccctcgaaccgacgggacgtttagttacttcatggcctgcggcggatggcgcggcgccggcatgggatgttgtgccagacggtgatcgtgcgctgagctatgatgatggtacgtttattggccatcgtggctatcacgcgggtcatgcgcctgcgccgctgttctggttcggtcacggactaggctatgggacctgggaatatggcactgtacgtgccagagcaggtgaaggcggcccagtggttgatgttgaactgacgaatacatccagtcgtgcgtcgcgtgaaaccgttcaggtctatttagatccggcggaagatgatcagccgatccgtctgattggttaccagggcgttgatgttccgtcgggtgccaccgcggctgtccgtgtccggtgtgatgaccgcctcttacgtcggtgggacgatgccgcgggtacgtgggcaccgctcgctggtgggggcgaattggtactcgcgcgcggattaggcgatgtccgagcccgtgttcccttagcgtga

SEQ ID NO: 553 - DNA, 1923 bp, Artificial Sequence
  6xHis UPI0011696FAB
atgcatcatcatcaccatcatgaaaacctttacttccagggttcgatgctgttatttaactgcaaagcgcactcgacgttctttacccgttcagcgttttttctgaccccgtttctggtgcttatgttgaatgcgtgtgataagaaatccgaggttttaccggacgttgaaaatcagaacgaatcaaaagatgcattggccctgtcggttacaccggccccggttacctttgatccggcattttatcacgttgattttgggaagaatgtcctggtttttgatccctcgatggatactcagctgatgcaagacgcgctggatcgcctgcatgaacagcaggcctttgacgaattttcgtcgcagcgttacgccctgctttttaaaccaggccagtacaacctgaatattaccgtggattactacacacaggcattaggcctcggccaactgccttcagatacccgcattaatggtgccgttcaaagcgtaaccaccacagaaggcacgaaagtgacgaccatgttttggcgtagcgccgaaaacttctacgtgaaaccgcaggatgaattgatgtactgggcagtttcccaggccgcaccgtatcgtcgtatgcatgtcgccggcaatgtgaattttgacaaacacggctgggcaagcggcggtgttctggcgaatagtattattgaaggccgtgccggactaacgtctggtcagcagtggtttgttcgcaactcacaagttggtaagtgggagggcggcaactggaatcgcgtattcgttggcgttgaaggtgcgccggcccgcgactggcctaaaaagccgaccaccgtgattgatgccacgccgattgtccgtgagaaaccccaattaatgctgaacgaacaagatgaatacgtggtgttcgtcccagaagtgcgccataacacgtcaggtgtttcttggcttccgcgcgaggggaaagccgaagcgggtaaacacattccgttgcacgatttttacatagcgcgcgcggataaggacgattccgattcgatcaacgcagccttgaaacaaggcaaacatctgctgcttaccccgggcgtgtataaaatggaagaaaccatccatattgagcatgctgataccgtcgtgtatggccttggcttaccgacaatcattcccatcaaggggcagaccgcgatcgagacagcggacaaagatggcattattctagcgggtgtgatggtggacgcgggtttgttgtcctcgccaagtctgattacagtcggcgaagaaaaagcgagcgcggaccatgcacaaaatcctgtgtctctgcatgatgtgtattgtcgcgtaggcggcgcactgtacgggactgcggatacctgtctgactatcaattcccaccaggttctagtagaccatgtgtggctgtggcgagcagatcatggagtaggcgcggattgggagatcaataaatctcgtcatggcttagtcgtcaacggcgacgacgtaacgatctatggtctgttcaatgaacatttccaggaataccagaccgtttggaacggcgaacgtggacgcacgtacttctaccagagcgaaatcccgtatcaacctccgtcttacgaagcgtggaacgacggctcgaagatgggcttcgctagctataaagtggcagacagcgtgacctcgcaccaggcatggggcctgggcatttacagcttttttcgcggcaagagcaccattgaaaacaatatgcgtctgtcaaatgcgattgaagccccagagcatgccggtatcgagttccagcacatgattatctttgcaggactcaacggtggcattgaccacgtgattaacgggcagggtccgagcgtaaacgttggtgagttgaaattttttgaacgctttaatggcgctgaggcgtctcccacacattga

SEQ ID NO: 554 - DNA, 2289 bp, Artificial Sequence
  6xHis UPI0000EFB564
atgcaccaccaccaccatcacgagaacctgtatttccagggttctatggtagtcagcgaaaaggcggcattgtatcctctgccgctgccgctgcgtccgctgggacgctacagtcagcattggcatctggtagtggagttaggtgagtgggaagcggcttatgaaaaggcaagtgtgttcgtcgcgaacttgaccaccgcacaaaaggtagcgttgattaccggctcatcggttgaaagcaccaaagcgaactttactgcgttttattttctggacggcgacatgggcctgcaggatttctattacgtttccgctttttctctgtcatcggccttggccatgacctgggatcgtgatgcgatctattcccaggcgaaagccgtgggctccgaattctacaataagggtattcaagtcgtagcgggcccgaccagtcaacctttgggtcgcaccgtttggggtggtagaaatgtcgaaggcttcggcccggacccgtacctcaatggcctggcaaccggtctgactacgaaagcgtatgtagatgcgggagtgattgcaggaggcaagcacttcatctttaatgaacaagagacgaatcgttcggcttctgacgcaactggtgccccgtatagtagcaatgttgatgataaagcgacgcatgagacctacctctggcctttttatgatgctgttaaaaacggtctgggcgcggttatgtgtgcgatgaacaaagtgaatggcacgctggcgtgtgaaaacagcgatctgctgatgaaaacccttaaaacagaacttggttttcccgggttagtgtggccggatttcaatgcgcagagtagtgctagtacatcggcgctgggcggcgaagattatggaagctcaacctactggagcacgtctacaatccagaaattgctgtccaatggtactctttcggaagcccgcttcaacgatatggcaattcgcaacctgatggcgtattactatgtgcatttagacaacggcttacaaccgaccacccgtccgaccgacacctatgtaaaagtccgggtcaaccacagcaaactgattcgtgaaaatggtgccaaaagcatggcgttactgaagaacaaaaacggcgcgcttccactgaaaagcccacacgtaatgggcatttttggcgcacatgcaggcagtgtcatgggaggccccaatggagcgatcgatgtggaaggtagtggtccaacgtaccaaggccatttagtcactggttcaggttcaggacgcggctcggtaccgtatgttattactccgttacatgccttaacggatcgtgcgtcacaggatggaacgatgctccgctggatcctgaatgatacctatacgtccaccgatagcagctcattggtggattcaagtacaatctataccaatattgaaccctcgtacgcaaactttgcaactgagagcagtgtctgcctggttttcttgaacgcattagctggcgaaggcgcggaccgtacggagctgtataactctgatcaggattcgatggttattcacgtggccgataattgcaacaatactattgttatcattaataccgtcggtcctcgcctcatggaacagtggattgatcatgacaatatcaccgcagtgctttatggcagtttactgggacaggaatcgggcaactccattgtggacatcctctatggcgacgtgaatccgtcagcgcgtctgattcacacaattgcgaagaatgagtctgattacaatgttggcatatgctacacggcccaatgtaatttcaccgagggggtgtacttagactatcgctacttcaacaaacatgacattacgccgcgctacccgtttggacatggcttaagctacacgacgtttgactacagcgacttgcatatcacagcgccgtcgtcaatttccaaggcgcctcagggcaaaaaatccgtgggggggccgagcgatttatgggacaacgtcgcctccgtttctgtgcttattaccaacaacggtactttggccggtgcggaagtgccgcagttgtatattgagttcccggaggctgccgatcagccggttcgccagttacgcggttttgaacgtgttgaaattgatgccggtggccacagctatgtgacatttgatcttcgtcgccgcgatctgtcgtattgggatgtgttagcgcaagaatggctggtggcatcgggctcatataatgtatatgtgggcgcaagcagtcgtgatttacggctgaacggcaccttctcgttaacagtgacggcatga

SEQ ID NO: 555 - DNA, 2280 bp, Artificial Sequence
  6xHis UPI000164423D
atgcatcaccatcaccaccacgaaaatctgtacttccaagggtcaatgatcccggattttggcccggcatgggctaccgcttacgagaaagccaaagcaaaactggcaggcttcaccctggaggaaaaggttaacgtaactaccggcgtcggttgggcgaatggccgctgcgtgggcaatatccctccggtggagccaacgcagggtcgtggttggccgggtttatgcctggaggatagtcctcttggcgtgcgcttcggagatttcgttacagccttccctactggcgtgaatgcggctgccagctttaaccgtaggctgatccgattacgcggcttatttatgggcttggaacataaaggcaaaggtgtcaacattgcactggggccgatgatgaatatgggtcgcgtagcacaaggtggacgcaattgggagggcttcggtgccgatccgtacttgaccggcgaagctgcttacgaaacgattttaggcatgcagatgggcggtgtacaagcatgcgcaaagcatctgattaacaagcaccaagagcatttccggacccaggaaagctcagacgtggatgatcgtacccaacatgaaatttacgcccaccctttcttacggagtgtgatggcgggcgtaacgtctctgatgtgttcatataacctaatcaatggcacctacgcgtgcgagaacgacaaaatgctgaatgatatcgtaaagcgtgaattcggttttcagggatttatcatgtcggactgggcagcgacccacagcactatcagtgtcatgacgggcctggatatgaccatgcctggcgatataacattcgatagcggcacctcttactttggagataatctcatcgcttacatccagaacggaactatccccgaaagcaggcttgatgacatggccacccgtattctggccgcatggtactttctgcatcaggatgccccaagttatccgccgaccaacttcgatgcgttccgcccggataatgaaaccaccaatgaacatatcgatgtgcaagatgaccatcattggttagttcgtgagctgggcgctgcatccactgtgttactcaagaacgtcggcggtgcactgccgctgggcaaaaaagatcgcagcattgtgctggtgggtagtgatgcgggcccgggctccattggacctaatgaatttgcagatcgtggcggctccgatggcattctggctatgggctggggttcgggaactgcgaactttacctatttagtgtcaccactggaagctattcagcgcaaggcacgagaattccgtaccagcgttagctggatcctggatgacttcaatttagccctggccggaaacatggcccgtaaacgctcagcggcgctggtgttcattagctcggatagtggtgagggctatatcacagtcgatggaaatgaaggagaccgcaagaacttaacggcgtggcatggcggcgatgatctggtgctggccgtggctgcgcagaacaataatacgatcgttgtcgtgaactcggtgggtccgcttattatcgaaccgtggattgaccacccgaatgtaacagccgtcgtgtgggcaggattgcagggcaatgaagcaggaaatagcctggtcgatgttctgtatggtgattggaatccaagtggccgcttgccgtataccattgcgaaaaacattgccgactacccagcgcagctgattactggtggcgaaggccaagacattttagatatcccgtacagcgaggcgctggagattgattaccgccatttcgacgcgaagaacataactccgcgcttcgaattcgggtttggcctgagttatacaacctttaaatacagcggccttagcatcagcaaaattgagagccccgtgaatgacgccctgatcgataattgggaaaacgggggcgccacccctattgaagaaggaagctctcgtgcagcctggttacatgaaccggcctttagcgtgtcgtttaccgtgcataacgccggctcttcatttggcggggatattccacaactgtatgtaaactttccggcaagcgctggcgaaccgcctagtgtattgcgcggttttactgatgtcgaagtcgcgccgtatgagcgagaaaaagtaacgattatcctgagccgctatgatctgagcatttgggatactgaggctcagggctggcgtaaaccgaaaggaacgattcatctgagcgtgggtgcgtcaagccgcgatatcagactccggggtaaaattccggcagaatga

SEQ ID NO: 556 - DNA, 2370 bp, Artificial Sequence
  6xHis UPI00017357F6
atgcaccatcatcatcaccacgagaacctgtacttccagggatcaatgactaaacccagcccgaaaatcccggattataaaaacccgcgtgtagtggccgcgcgccgcgttaaggatctgctggcccgtatgaccctcgaagaaaaggcggcgcagatgatgtgcgtatggcaagagaaagccgcgaaactgctcgatgggaatggtaactttgacccggccaaagccaaggcagcgtttaaaaagggacatggattgggacaagtgggtcgcccgtcagatgcaggctccgatccagcgactccggcgaacgggaaaactgcacgcggcatggcggaactgactaacgccattcagaaattttttctggagcatagtcgattgggcatccctgttatgttccatgaggaatgcttgcacggtcatgccgcgcgtgatggaacctcatttccccagcctatcggtcttggtgcgaccttcaatcctgcccttgtcgaaaagctgtatgcaatgacggcccatgaaactcgcgtacgtggcggccatcaggcactgacgccggtggtcgatgttgcccgggatgcacgctggggtcgcgtagaagagacgtacggtgaggatccgtttctgaacacgcaactgggtattgccgctgtgcgcggattccaaggtgatgcaagtttcaaagacaaaaaacatgttatcgccacactaaagcattttgctgcacatggtcagcctgagtcgggccagaactgcgccccggtcaacgtcagcgaacgactgctgagagagactttcctccacccgttccgcgactgcctgaaaaaaggtggagcaatttcagtgatggcatcctataatgaaatcgacggcgtgccgagccacgcgagtcgttggctgctgcgcgatgtactccgtaaagaatggggctttaaaggtttcgtggtatcggattactatgcgatttgggaactgagccatcgtccagattcccatggccatcatgtggcggcggataaaaaagaagcatgcgttctggcggtcaaagctggtgtgaacattgaatttccggaaccggattgctatcgtcatctggtagaactggtgcgtaagaaagttctgcacgaaacggaactggacgaactcattgcacctatgctgctgtggaaatttaagatgggcctgttcgatgacccttatgttgatcctgaggaagctgcacgtgttgtgggttgcgaagtccatcgtgaattggcctcagaagcggcccgtgagaccattacccttttaaaaaatgaaaatgatcttttaccgctgaaccctgctaaactcaaaacggtggcagtaattggtcccaacgctaaccgcagccttctgggcggttactcgggcgttcctgcacataacgtaaccgtactggatggtataaaagcccgtctcggtggcgcggtgaaggtagttcacgctgaaggttgcaagataactgttggcggctcatggcagcaagatgaagtattagcgtcggacccggcagaagaccgtaaacagattgatgaggccgttaaagtggcctggtctgctgatgtcgtaatcgtagcaattgggggcaatgagcaaacgtcccgtgaagcatggagcctaaaacatatgggcgatcgcactagcctggacttgatcgggcatcaggatgagctgattcgggcgctgttagcgacgggtaaaccagttgttgcgctggtgtttaatggtcgtcccttggcgattaatcacgtagcccaaaatgtccctgcgattcttgagtgctggtacttaggccaggaatgcggtagtgcggtagccgccgtcttatttggcgatcataacccgggcggtaaactgccgatcagcattccgcgcagcgttggtcagttgccagtgttctacaatcacaaaccatcagcgaggcgcggttttctgtgggacgaagccacgccactgtttccgttcggctttggtttaagttataccaaattcaccttcaaaaacgtgcgcttagcgaagaagattatttctcgcaccggttctacccatgtatctgtggatgtgacaaacgccggtaaacgtgcaggtactgaagtggttcaagtgtatgtccgagatctgatttctagcgttacacgccctgtaaaagagctgaaggtgtttcaaaaaatcactctagctccgggcgaaaccaaaactgttagtctggatcttacaccggagagcttggcgttctacgatgtgaatatgaaatacgtcgtcgagcctggggagtttgaaattatggttggaaacagctcccgcgatgtggatctgcaaaaagttgtgttgcgcgtcgtgaaatga

SEQ ID NO: 557 - DNA, 2475 bp, Artificial Sequence
  6xHis UPI00042469F6
atgcaccatcaccatcaccacgaaaatttatacttccagggcagtatgaacaaacccatttacaaaaacgccaaatacaatattgaggaccgtgtcaacgacctgcttagccgcatgaccctggaggagaaagtcatgcagctctgttcagagctgccgagcaacttcatttttaatggagagatcgactacaccaaacttaaaagcttcggcaaaaatgggtatgggcgcattacgcagtacagtctggtgggcttagtgagcccgcagaaaattgtgaagacctccaacagcattcagaaattctttattgaagaaacccgcctgggcatccctataattttacaaagtgaatctttagtcggctaccctggcaaagagggcactatttttccaagcatgctcaacctggctgccacctgggaacctagcctggtgaaaaagatggccgaaatcatcggcgaagagtgtcacgccgtaggtatcaataccgtcatgagccctgtagtagatatttcgcgtgatttacgctggggtcgttgctatgaaacctttggggaggatgtgtacttgactacacagatggggattaattatgtgaaaggcattcagtcaaagaatgtgagctgtattgcaaaacactttctaggctacgccgaaacccagggcggtcttaatacggcggttacgcgcttaaacaaaaaggaactgtatgaagttttcgcgactccgttcgaagcaatggataaaatcgccaatctggatggtatgatggcctcatacagcgaaatcgatggactccctgttggctgcaacaaagaaatcatacatgatctgctgcgaaaaactatgggtttcaaaggactgttaaccagcgatggggccgccatttggaagatctatgattactttaaaattgcccagacatacgcggaagcgggcttgctggccaagaaagccggtctggatacggaaattccggtgtctgggacttaccgccacttaaccgactttgtgaagaataacaaactgaatgaacatattattgatgagagtgttaaacgcgtactgaccattaagttcaaactgggcctgttcgaaaagccctacatcgaagagaagaacatctttaatcagctcaccaacaataccaaaaaaaagtttagcgaacagatcgcggaaaattccattgtgctgctgtcgaataaggaacacattctgcctattacgtcaaattgcactattggcctgattggaccacacgcgaacagcaagcgttatccgatttcaggctattcataccctgcgtatattgaaatggtgcaggctctgaaaaacaagtcaaacaaggacatcagctttaatggtgtcatcgacgaagaaaacaaaatgcaggactcgcagtcgttcaactcgatgtataatatttttcagaataccgattggaattatctcaacaacaccaacacaattatgcagaacattcaggccaccacacttaaagaagaactggaaacgttctataagctgaactacagcatgggatgtgatattaccaacactaacttcgatgatatcgagaacgcctacaagattgctcaggagtctgacattatcattctgacggtaggcggcaactgcggctgggtaaatgttaccatcggagaagggaaagatcgctgcacgctggaccttccgggcctgcagcaaaaactgctctccaaactccagatggcaaacaagcacattatactgattatgtatgggaccatctataacatttcttccaccaaaaatatcaaagcaattctatatgcgggccttccaggtccgtactcgggtaaagccattgccaacatcatcaagggcaacgccaatccgagtggcaaactgccgtttaccattccgcgcagtgtgggccagataccgatttattacaaccacaaggtagggagcggttatcatagcataggagacaaggccatgagtactatcttctccggcggctatattgacggcatttacagcccgttgtatccgttcggctttggcctcagctatacctcgttcctcatcagcgatattaacatcaagaacaaaatcattaaattgggcgatgatattaagctgtcgtgtaaaatcaaaaacacgggcagctttgctggcagtgaagtcgtgcaaatttactactatttcaaggaagcgcacgtgattcgtccgaataaacagctgattgcgtttcagaagatcaccctcaaatccaacgagtgcaagaccattctgtttactattaacacgaaacaacttggttactacaatgaggaaatgcagttcgttatcgaacccggcatggccaacctgatgattggtacctcgagtgaagatatcatttaccagacgaatatccagctcattggtaatccgctgaatattatcggtaaccgtacctactccagccaaaacaagattatttga

SEQ ID NO: 558 - DNA, 2622 bp, Artificial Sequence
  6xHis UPI000BC209C3
atgcatcaccaccatcatcatgaaaacttatactttcagggcagcatggctccatacgatttagaatcatacggcacggccgatttacatgatgtgctgtcaaaactgaccgtggccgagaagatctcgctgttagcgggccccgattggtggaccactacgcctctgccgcgtgtgggtgtaccgcatattaagtgtagtgatggtccgaatggtgtgcgtggaagttcgcattttctgccaaccccggcgcagtgtatcccgtgtgcgaccgcactgggtgcaacgttcgacatcagcctgatcaacaatgttgggggtttactggcccgcgaatgcaaagctaaaggtagcagcttattgttggccccgacttgtaatattcaacgtaatcctctgaatggccgagctttcgaatcgttttccgaagatccgttccttagcggtactattgcggcgcattacattctgggattgcagaacaacggagtgggagccgttattaaacatttcgtgtgcaatgacatggaacatgaacgtctgagtgtggatattcgcgtcggagagcgcgcgttgcgtgaaatctatttgatgccatttatgttagcgcagaaaattgccaagccttgggccgtcatgacctcctactcgcgtgtcaacggcattcattgcagtgaaaatcaccgattgctgcaaactgttctgcgcgaagaatggggtttcgacggaatggtaatgagcgattggtcaggtacctactcgacggcagaagctgtacatgctggcctggatttggaaatgccgggccctacccgttggcgtggcgacctgataaatcatcttatccacgcaggcaaagtgagcttcgataccctgtcatctcgtgcctatgcgatactgcagattgttcagcgcgccgttcgtgctgacccctcgctggtgaaaaacaacaccttaccggaacgacagcttgatagccccgatgatataattctgaatcgtcgcgtggcagcggaatcgatcgttttactgaaaaatgacctgggtgtgttgccgcttgacgttaaaaaaattaagaaattagccgtaattggaccgaatgtgaaaacccgcacggtaagcggtggcggtagcgccttcctgctttctagttacgtagtgaccccgttggaaggaatcgaggccgcccttgaaggtacggagattgacgtagtttattcaccaggctgctacgcacatcgatacctacctatgctggacggttggatcaagacagcggacggcactgatggctggacggcgacgttttacaattgtgacccggatgcgggagcctcgccgttaagcacctacaccttgttatctacccggcttcgtattaacgatgagaaaccaaaaggccttgcggagcatttctacattattctgcgtggttatctgacggcacaggaatccggaccgttcgatctaggcattagtctggtaggccgcgccaccgtgtccctagatggcaagttaatggttgataacggtatgaaccgtccgcaaaccccgggtgatagcttttacggtctgggtagcatcgaagaaactgcaaccgtgaacttggtgaagggccagacctatgaaattctcgtgaagtatacgaacacgccgattccgattagctcagatcagggagccgaagtcaaacaaccaccgctaatgatggcagccttacgtgtctctggtgccccgaaaattgacccagctaccgcgctggatgacgcagttacccttgcacgcgatgcagatgcagtggtatgcgtcattggcaccaatatggactgggaggccgaagcgtccgatcgtaaaggtctggatcttccgggcttgaccgatgagttagtacgccgtctgctggatgccaaccagaccaccgttgtaattaatcagagcggctcggccgtagcgtttccctgggtcgatcgggcaagtactgtcgtgcaggcctggtttaccggcaatgagtgcggtaacgcactcgcggatgtgatttttggccgtgtaaacccagcgggccgcttgccgctgaccttccctaaatgcattgaagattgcaccgcgcatctgaactggggtgctgaaagcggtcgtgttacctacggtgagggcatcttcgtaggctatcgcggctacgaggaaacgaaacgtgaaccgaccttctattttggacatggcctgagctatacgacctttgagtggtcccctctggaggtgaaactgacgagcgcgagcaacgagattagcgtggcggcgaaattaaccgtaaccaataccgggtccctgccggggagtgatgtggtacagttatatgtaattgataaggtctgctcataccgccgccccaaacgtgagcttaaaggcttcgcgaaaactgaaatcttgtctccgagtcagtcgcaggaagtcctgattatgttggacaaagcggccttctcgttctataacgatgcgcgtatggcctgggttgtagagaagggtctctttgaggtgtgcgcaagccgctcggcgaatgttgttgatgtgatgtcagtagtggaagtgcttatcgatgaagatctgatctggagtggaatttga

SEQ ID NO: 559 - DNA, 2739 bp, Artificial Sequence
  6xHis UPI000D2EAE87
atgcaccatcatcaccaccatgaaaatttatactttcaaggctccatgcgccattacgcggaggaaggctcaagcgagcgcgcaggagatcgtaacatgccggaaactcgtccgagctctgggagcccaccaccgccagccactgaaactccgatgagtccggttccgccgcatttaagtccacctagacctccgctgcgccgtcttttagcggttttagctaccttgctggccacggtagcactggttgcgcctccttcacctgttcgcgcggccgatcctttaattagtcagggccgtccgaccgcggcgagttccgtggagaatgcaggaacgcctgcgtcgaatgcgaccgatggagatacaggtacccgctggtcaagtgcgtttggagatccacagtggattcaggtcgatctgggtgcgactgccacagtatcgcgtgtcactctggtctgggaagcggcgtacgctcgttcgtaccaggtacagacctccaccgacggtgccgcgtggacaaccgtcttttctaccaccgccggagacggtggaaccgatgatctgacggttagcggtactggcaggtatgtacgaatgaccggcacagcgcgcgcaactgcttatggttacagcctgtgggaatttcaggtttatggctcaacagcggggggcaccggctgtgataccgcaaccaacgccgcgcaaggccgaccggctacggcctcgtctaccgaaaacgcaggtacgcctgcgacagcagcggtagacggtagccctaccacgcgttgggcatcagctgcgtcagatccccaatggcttcaagttgatcttggctccgtgcgcaccctgtgtcgtgtggtgctctcatgggaggccgcatacggtcgcgcctatcaaattcagacgagcaccgatggggcagcctggaccaccgtttatgcgaccactactggcgatggtggcactgacactctgactgtgagcgggagcggtcgatatctgcgaatgtatggaacggcacgtgctactgggtggggttattcgttatgggaagtgacagttaatactgcaggcggaggtacaattcccggtggtggttcgttagggcctaatgttctgacgtttgatccgtctatgagttcagcatcaattcaaagccagttagatgccgtgtttcgtacacaagaaagcaatcagtttggcacccagcgttatgcgctgatgtttaaacccggggattatagtggaatcaatgcgcagattgggttttacaccagtataatgggtctggggcgcaatccgggcgatgtacggattcacggtgatgtgacggttgatgccggatggttcaacggcaacgcaactcagaatttttggcgctctgcgagcaacatgcaggtttttccaagcgccggttttactcgatgggcagtgtcccaggccgcgccgttccgccgtatggatattcaaggggatttaaacctggccccgaacggctacggctgggcttcgggaggctacattgccgattcccgagttacaggcgtagttcagccgtattcgcaacagcagtggtacacccgtgatagtaacgtaggtggttatttgaatgcagtttggaacgtaacgaattcgggtgttgttggcgcgccggcgacgagctttcccaatccggcgtatacaaccctggcacagacccccgtgtctcgtgacatcccgtacctttacctggatggctctggcaattatcaagttttcgttccgagcacccgtactaatgcctctggtgcaagttggctgggaggtgctacggcaggcactagtgtccctctgtcgcagttttatgttgccaagccaggagattctgcggcgaccattaatgcagcgctggcccagggcttaaacctcctgtttacaccgggcatttatccagtttcgcagaccattaccgttaatcgtccggggactgtcgtgctgggcgtaggttatccgaccttaatacctcaaaatggcgttaccgcgatgtctgttgcagacgttgacggcgttcgtttagcaggacttctgttcgatgcgggccccaccaatagcccggtcctgctgcaggttggaaccgcgggtagcagtgcaagccatgctgccaaccctacgtcgatccaggacgtgttttttcgcattggcggagcgggcgccgggaaagcaacaacgtccttggtcgtgaaccaaaacgatgccctgattgatcatatctgggcatggcgcgcggatcacggcacgggtgtgggttggactgtaaacaccgcagatacgggtcttatcgtgaacggcaataacgtcactgcactgggcctgtttgtggaacactaccagaaatacgaagtcatttggaatggggaaaacggtaggattattttctttcaaaatgaactcccgtacgatccgccttcggcgtccgcatggatgaacggttctagggtcggctacgcggccgtgaaagtggcagatgcggttagcacctttgagggctggggcatgggcagctactgctacttcaacgttgatcccaccattgcggcttaccatggttttgaagcgcctattaaaagtggcgtcaaattccatagtctactgacggtgtcgctcggcggcaacggaagtatcacgcatgtcattaacgacactggcgggaccgcccaggggaccaataccgttcccgtaaatctggtgagctacccatga

SEQ ID NO: 560 - DNA, 1491 bp, Artificial Sequence
  6xHis UPI000DA286EE
atgcaccatcatcatcatcacgaaaacctgtattttcaaggctccatgagcgaccacggtgcgattaaagaactgattaagcacggcgtagcagctgatccggaagatgcggtacgcgtagcccttaagagcggtattaacatgagcatgtctgacgagtactatagcaaatacttgcccggcctcgtaaaatcgggcaaagtgacaatggcggaattggacgacgcaacacgtcatgttttaaacgtaaagtacgatatgggcctgtttaatgacccgtatagtcacctgggcccgaaagattcagatccgcaagataccaatgccgaatcgcgtctgcatcgcaaagaagcccgcgaagtagcgcgcgagagcttagtcttgcttaaaaatcgcctagatacccttccgctgaagaaaagcgggaccattgcggtgattggcgccttggcagattcaaagcgtgatatgatggggtcttggtccgccgcaggcgtggcggatcaaagtgtgaccgtgctggccggcatgcaaaaagcgctgggcgatcagggcaaaatcatctatgcgaaaggcgcgaatgttaccgacgataaaggcatcgttgattttctgaatttgtacgagaaagcggtgcaggttgacccacgttcgccccaggaaatgatagacgaagcggttgccgcagcaaaacagtcggatgtggttgtggccgttgtaggagaagcgcagggtatggcgcacgaagcatcaagccgtacggatattaccctcccgcagagccagcgtgcgctgatttctgcattaaaagccaccggaaaaccgctagttctggtgttaatgaacggccgcccgttagcgctggtcaaagaggatcagcaggcagatgccatcttagaaacttggtttgcgggcacagagggtggcaatgcgattgccgatgtattgtttggtgattataacccgtccggcaaactccctatgagctttcctcgctcggtgggacaaattccgacctactattcccatctgaataccggccgtccgtataacgcggataaaccgaacaaatacacgagccgttatttcgatgaggcgaatggccctttgtacccatttggttatggcctgagctacacaacgttctcagtgagcgatgtcaagatgagcgcaccgactctgcagcgcgatggatcagtgacagctagtgttcaagttactaacactggtaaacgtgagggagcgacagttatccagttatacctgcaggatgtgaccgcctcactgtctcgcccggtgaaaatgctgcgtggttttaaaaaagttacactgaagccgggtgaaacccagacggttagctttccgattgatatcgaggcactaaaattctggaatcaacagatgaaatacgacgccgaaccggggaaatttaacgttttcattggcgtcgatagcgcccgcgtgaaacagggcgaatttgagttgctgtga

SEQ ID NO: 561 - DNA, 1443 bp, Artificial Sequence
  6xHis UPI000DFAEF6C
atgcatcaccaccaccatcatgaaaacctgtactttcaagggtcgatggaatatcgttttcccgaaggtttcgtgtggggagcagcgactgcggcattacaagtagaaggtgcgctggatgcagatggtcgtggtccttcggtgtgggatgtattttgtcgcgaacatcccgaacgcatatttggtggtgtgacaccggcggttgcgtgtgaccactatcatcgcttcgcagaagatgtacgtcttatgaaggaattcggccttaccggttatcgcttaagcattgcatggcctcgactgtttcccacgggggatggcccgttgaacgaagcgggtgcagccttctatcaccgtctttttgatgctttgactgctgccggcattgaaccacacgtgacgcttttccattgggatctgccacaggcactggcagaacgtggaggatgggaaaatccagccactgtagccgcgtttgtggcctatgcccagacctgctttcgtctattcggcgatcgcgtacgtcgttgggcaacctttaatgagccgagctggatgatcttaaacggttggttgaccggtcttcatccacccgcctggcgtgatccagctgccgccgtgcgcgttagtacagcagttctgggtgctcatgctcgtgcagttcgtgcatttcgagaaggaggccacctgggggcgattggtattgttttgaatctgagccctgtgtacccggcaacggaacgtcctgaggatgcgacagcagcacaacgcgcagacggcatcctgaaccgttggtttcgccgtccagtactgcatgggtcgttccccgaagacatttgggcattgtatgaggactgccgcattgccccagctttaaccccagatgaccgtcaggcccttgcggaagcgcgccctgacttcctgggagtgaattattattacccgcatcatgcggttgcagacgccgcggagacatcttttcacctgaacatcacaggggatcgacgcgaggattgcgtgtttgcgttagccggcttatttcgttttgtaaaaaacccgacgggccgctatacagattggggttgggaaatctatccggaaggcctgtacgatctgctgaaaaacattaacgaagaacgtccggacttaccgcttttcgtaaccgaaaacggcattggccttgccgatagggttgtggatgggcgtgtagacgaccaggcacgtattgccttcgtgcgcgaacacttacaggctgtccatcgtgccattgcagcgggcgttccggtgagaggttattttctttggtcgctcctagacaactttagctggcttaacggttaccgcaaacgttacggcctgttttttgttgaccgcctgaccttacggaggatcccgaaagcaagtgcattttggtaccgcgaggttgcgcgtgcgaatggtttctga

SEQ ID NO: 562 - DNA, 2577 bp, Artificial Sequence
  6xHis UPI000E399EE8
atgcatcatcaccatcatcatgagaatctgtactttcagggctcaatggccgcggggcatgtcagcgatgaactaccattcgatgtcgaaaccgttatttcggaagcgaccgtccttgagaagattgggctgctctctggtaaagatgcctggcacacactggatattccccgtttgaacgttccatcaatccgttttaccgacgggcccaatggcgccagaggtacgcgtttcacggcgggcgttcctgcggcgtgtttaccgtgtggttccgcgatgggtgccacctggaatcagaacctgatccatcaagcgggtgtgctaattggcgaggaagttaaagtcaagggggcacatggttggctgggtccgaccgtgaacatgcaccgctcaccgctgggtggtcgcggctttgagtcatttgcggaggatccattcctgagcggaaaattagcaggttcctacattaaaggtgcccagagcaccggtattgtgagcacccttaagcattttgtggcgaacgatcaggagcatgaacggatggccgtggacgtcaaggttaccgatcgcgcattacgcgagatttatatgctgccgtttcaaattgcgctgcgtgatggcaagccgggcgcaatcatgacaagctataataaagtgaacggtacccacgtctctgagtccgaagaatttatcgaagatattttgcgtgaggaatggcagtttaaaggcatggttatgagcgattggtatgggacgtacagtacctcggatgcgctcaatgcgggcctggatctcgaaatgccaggtccgacgcgttggcgcggcatcattgcggatctggcggtatccagccgcaaggttactcatcgcaccttggatgctcgcgcacgtaatgtgctcgaactggtgaaacgatgcagtaaaattaagggcgtgtccccggtagaagggaaacgtgacctgccaagcgatcgtgccctgaatcgcaaagtagccgcagaaagcatagtcctgctcaagaacgataacaaagtactgcctctctctgccgatatagatgagatagcgctgattggcccgaacatgatgaacggcgcgtactgtggaggcggtagcgcccagttagacgcctattacatcgttaacaattatgaaggaattgtgagccgcctcacacagcaccgtccgcatactgatgtgaaaattcactacgagatgggaacccgtgcatacggtttcctccccttactggggcagaccgtaagcactccagatggccaaatcggtaaactgcgaatgagatttttcgatcagccgccgacggtaccggatcgcgaagtgattgatgaattgattattactgaatcaacctggcagctcatggggtattctcatccccgcatctcagcacgattttggacggacgtggaaggcgtgttccagccttcggaatcagcaaccttcgaatggggcatcgcctgctatggcacggcttcgttgttcattgacgatcagctggtgatcgacaatactaccaaccaggaggcgggcaacacgtttttcggtaaaggcacaactgagaaaaaatgtatcctggatatgaaaaaaggaactaactataacatccgccttgaatttggcagcgcagccacgaccaaagttattaaaccaggcgtcgttagctatggaggtggcgccggtcgaatcggtgccgctccgatgctagatccggagagctccatcgaacgtgccgtgcaactggccaaacgttgcaaacacaccataatctgtgtcggcctagataaagatttagaaagcgaaggctacgaccgcgcggacatgaatcttccgggggcgacttccgagctgattacccgcgttttgcaggccaacccggataccatagtggtgacgcagtcaggcacccctattaacatgcaaccgtgggtggcgcagacgaccacacaagttcacatgtggtacggtggtaatgaaagcggtaacgggctggccgatgtgttattcggcgtggaaaatccgtcgggcaaactgcctgttacattcccggtagcagtggaagatacaccggcgtttctgaacttcgaatctgagcgcgggtcggtggtgtacggagagggaatttatgtcggatatcgttactacgaaaagctgaaacgctcggtgaccttcccgttcggccatgggttatcgttcaccaccttcagtttctcggcgcttcaggtgtcgagtgaagggacaaaatttcgcgtccgtaattcgggtagtgtggatggttccaccgttgcacaactttacattagtcctgcgcctacaaataccatttcgcgccctgtgaaagaactgaaaggttttagcaaagtttttctgctggcaggcgaagagaaagaagtttttattcccctcgaccgcctggcgacaagcttttgggatgaagtgttggggtgctgggtgtctgagaaaggcatttacggtgtccatatcggagaatcgtccgtcgaaatctgcctgcagggaagtctgcatgtggataaaaccacgacgtggtctggcctgtga

SEQ ID NO: 563 - DNA, 2472 bp, Artificial Sequence
  6xHis UPI000FBC01E3
atgcaccatcatcatcaccacgagaatttatactttcaaggaagtatgagtccgattgctattgctgatgctcctgctcctagcgcggcagtcagcaaattaactttggacgaaaagatttcactcctgagcggtcgcaccttttgcgacacggcagaaattcagcgccttggcatccctagcgtgaaagtcagtgatggtcccagtgggtgtcgcggccagcttatgttcgatgcacttagcagtgcagtgtttccgaactcgtcttcactggcctcaacctggaatccggatctgattgagagcgtcggcgtcgaactcgggcatgaatgtaaactcaagagtgtccagaccctgttggccccgaccgttaatctgcatcgtgatccacgtggcggccgaaactttgaatgttacagcgaagatccgatccacaccgcggtaatcgccgccgcgtatgtgaaaggcatccaatccaccggcgtgggtacttgtgttaaacatctcgtgtgcaacgagcgtgagacccgcagaaaattatatgatgtagaaatctcagaaaaagcgctgcgtgaagtgtacttgcgcacctgggaaatcattatcaaagaagcccagccgtggagtgtgatgacggcgtataacgatctgaacggtaaaccgtgtagcgagcacgatgaggttattcgcatcgttcgcgaggaatttggcttcgagggtatggtgatgagcgactggtttggtactaaggatggcgtgcgcagtttaactgccggcatggaccttgagatgccgtttcccgtgcacaggcgccgccaattgccgggtgccttagcgaaaggcgaagtgagcgaggaagtggtagatcgcgcggtgcaacgtatgcttcagtggattaaacagaccaacccgccgctcaaccgccccgaagagcgcccttttgacaacaacactcatcgcatggaagtagcgcgccaagcggccaccgagggactggtcttactacgtaatgatcagaacgtgctgccgttacgcaaaaccccgggttctaaactggcagtaattggctattttgcccaaaacccaaccctctgcggcggtggctccgcatctgtcgagcctccgtatcgtacaattcccctggaaacaattcgcaaagcggcaccggaagtcgaagtgacccaccatgcgggcgttccgatttggaggattgtgccggttgtagataaaagactcgcgtccagcattcagttcaccctttttaacaaaggtgaggaaaaaccggtgtatcagggaaaacgtgagaagagtgccttcagcctattagatgagaaaattccggcgctgggcgaccagttcacgatagaactggaatgtgaagtaacagcgccgactaccggacgttatgttctgggcgtttttgcggtggggacgacagaaatatttgtagatggcaaaagccttgccacctttacccccgcccacatgagtacagaacaatttatttttaaccgcttcgattatgaggaacgctttgagctggatctcacagctggcaaaacgttcaccatcaaagtggtgtcccagagcaaaaccgccgagggttttgaacctgcaccccaaggcctgaatctgggccttacagaagttattgacgaggatgccgagattgcgggcgccgtagagatcgcacgctcagcggaccaggttgtgctcttcacaggcttaaacggtgaatgggaatcagaaggaagcgatcgtgcggatattcacctcccacgtagtcaggagaaattggtgaaagcggtgcttgctgtgcgtagcgacgtagttttagttaaccagagtggcagcgcgattgatctggaattctgtgaaagcatccacggtattgttcaagcgtttcttggggggatggaaggtggtaatgccattgccgacacattgttcggtgatgcgaacccgagtggacgcctctcgatgacattcccgaaacgtctggaagaccacgcgagctacgaatctttcacgaacgaagtggatggccgccttgtttacacggaagacattgaattcggctatcgttcttacgaaaaaaacggcgtggaacctgcgtacccgttcggctacggcctgtcttacacggattttgattggagcgcatcgaaattagtcagtagcgatccggcagccgccgtagttaccactactgtcacgaatagtggcaccgcagctggtcgtgacgtggttcaactgtatctgtcaccgccaggcggcacgcgcaaacttgctgcctttggcaagactccgcaactggaagcaggtgcttcgcataccttgaccctatccattgacaaacgtgagttcgagtcatggaacggatcgggctgggagatagcgccgggtaaatggactgtgtcgttatgccgaaatgctcgcgatgttgagtggaccgctgaaattgcactttga

SEQ ID NO: 564 - DNA, 2403 bp, Artificial Sequence
  6xHis UPI00068E4E50
atgcaccaccaccaccaccatgaaaatctgtactttcaaggatcgatggaattgaccttagatgaaaagatcgagttgctggaaggtctggacgtgtggcacaccaaacattttaataagctgagcaaatttatgatggccgatggcccacacggactccgcaaacagctgtcgcatggcgataacctgggcattaacggatccgaggtcgcgaccctgtttccgactgcgagccttctcgcgtcatcttttgatcgtaacctcctagaaaaactgggtaacgcattggcgaaccaggcgaaaagccaggaagtgaatatggtattgggtccaggcatcaacatcaaacgtacgccactttgtggccggaattttgaatacttttctgaagatccatatttgaccggtgaactggcgagcagctacgtacgcggtgtggaatccaatcggatcgggacgtcagtgaagcactttttcgctaataatcaggaaacaaaccgcctgttcatcaacacggtcgtagatgaacgtgcactccatgagatctatttaaaagcgtttaaaagagtaatcaaagaaaaacctgcgtccatcatggccagctataacaagattaatggctactacggtacggaacacccgattatcaacaatctcctgcgcaacgaatggggctacaagggcgtggttgtatctgattggggcgccattgataaccgtctgaatgcgttgaaagaggggaccgatctggaaatgccgagctcaaaaggttattatagtaaaattgtaaaagatagcctgtcggatcagcctgatttagtgaactacattgacgaatctaccaaccgcattatcgaaatgataaacaaatatcaaattaatgagaagattgaaactgatttcgaggttgaccacgaacttgcgatcaagattgcgctggaaagtatggtactgctgaaaaacgacaatattttgccgctgtccaatcataaaaagaccgtgataattggcgggttcatcgagaacatccgcacccaaggtgggggttcaagccatatcaacccatatcgcgtggaccaaatcaacgagatttaccagtcatattttgagcacgcgaaactgtcgctgggttatgaactggaccacgatggcaaatcacctctgctgtttgaagatgcttgtaaaaaagcaaaagaatcagatcaagttatctacctgatgggcttgccggaacgcttggaaacggagggtatagaccgcaagaccatcaaccttccgaaaacacaggttgacttgcttaaggaattgtacaaagttaatcagaacattgtggttgtgctcctgacgggcagcgttgtggataccagttacaaagattatgcgaagggtatcttgctggcgtacctgcccggggaaggcggtgctcacgctatcctcaagaccctcatcggcgaatccaacccgtctggccgcctgccggagacatggattgagaatcttaacgatgtgccgaaaatcggctatgataacgcctcagtgtactacgacgagagcattttcgttggctaccgcaaatattcaagcttcaatattaaagtaaattacccgtttggttacggcctaagctactcaaagctgacgtacgatgactttaaaatcgaggcccacgatacattttatctgcttagcatgaagatcaaaaatgaatccgaaatggatgctaaagaagttatccaggtgtatctagaaactattaagagcggcatcttccgcccgaagaaggagttagtggcttttgataaagttgagattaaaaagcagaaagagaaactggtggagattaaggtgtataagcagaatctgactttttacgatgtgaccaccaataaattcgtgaccgagacggggaattataaactcaacatttctaaaaacgtcgacgacgtgattcacgcgttcgatattaatttagagggtaacaaaacgtttgaagtgacctaccatgagccgtggaaactctacaaaaaggaaaacttcagtaaattgttcaaccacgaccttccgccaaagaacatcatctataaaaaaccgttcgatttaagcacacccttgtttgcattgaaaggcacctttatgggccgccgcgtcgttaactatattattaaagaggccacaaaacagattagtgattctaaacaaagctggatgcgccagattgtcgaaaattcattactcgagatgccactgcgctcattagcaagcttcggcagctcggtattaaactttgagatggtggaaggcatcgccgacctcgcttctaataaactgttaaaaggcatcaagaaaattaaacgaggtcaaaaagatttaaaacatgaatggaaaaatcaacccaagaactga

SEQ ID NO: 565 - DNA, 2316 bp, Artificial Sequence
  6xHis UPI001185F074
atgcatcaccaccatcatcatgagaacctgtactttcaaggaagcatgcgtgaactgcgtcgtcgaactctcttatcgggtctcagtgtggtaggcggtgcagcggttgccggaggagccgtaagcacgggtgtagccgaagcagcccctcgccctggccgtcatggtcgcgaagtggaagagctgttagatcgtatgaccgtagaggaaaagttgggtcaactccaacaattagcttgggcttgggatacaggtcccggtggcggtggtacgaaagatgcggaagatgctgcccgtgccggtcgtctggggagtgtgctgagtgtattcggtgccaaaagtacaaacgccctccagcgcattgcagtcgaagaatctcggctgggcatcccccttctgttcggtttagatgtgatccacggtttttggactacattcccgattcctctggcgcaggcagccagctttgatccagaagttacgcgtaccgacgcagaagtaagcgcgcgtgaagcgcgtgcccatggtgtacattggacctttagcccaatgatggatgtaacccatgaaccgcggtggggacgcatcgccgaatcgtgcggagaagatccatacctgacggcagaatttgcggcggccaaagtgaaaggttatcagggtcgcgatctgcgcgcgaaagatcgggtagcagcatgtgcgaaacatttcgttgcgtatgggggagcagagggggggcgcgactataacactgtcgatgtttctgagtcgcgtctgcgtaacctttatctgcccccgtttaaagcggctctcgatgcgggcgcagcaactgttatggcctcatttaatacgatttctggcgtacccgcgcatggaaatgcgcataccctgactgatgtactgcgcaaagagtgggggtttgatggttttgtcgtgtccgactggacgggcgttcaggaactggttgcacatggctttgcagaagacggcgcagcggctgcacgcctggcgttaacggccggagtggatatggagatggtaagtaccaccctgcgggaacacggtaaacagcttttgcgcgaaggccgcatttctgagcaacgcctggatgaagcggtagcgcggatcctcggtttgaaattcgctctgggacttttcgatgatccttacgtggatgaggcagcggccgtagatggaccgactccagcaacgcgcaaagcggcccgaagtaccgccgcacgttcagttgtcttactcaaaaacgatcgtgccgcattaccgctcaaaaagtctgttgcgagcttagcggtagtgggaccgttcgcagatagtgacgatttgttaggaacatgggtggttcctgcagccgcaaaaaaatatccgagtgtgaaagtgctggacgcggtacgacgagcggcgccgggcgctaaagttacctatgcattaggcgtagacgcggaaggcgaagacacaggtggaatccctgaagccgttgcagcagcgagggctgccgatgttaccgtggtggtagtgggcgagcctccggcgctgtcgggtgaagctgccgcacgagccgatattggcttaccgggcgcgcaagaaaaactgatcgaagcagttgcggccacaggtaaacccttcgttgttgttctggtgaacggccgtccgctgactgtgggtggttggctggagagtgccccggcggtgctggaagcgtggcacccgggtctggaagcgggtaatgcaatcgccgatgtgctattcggagcggtgaatcctggtggaaaattgcccgtttccttccctcgcgcagtggggcagatcccagtacattataaccatgagtccactggtcgcccgtacgccgcggacaacaaatatacctccaagtacctggatctgccgccggatccacagttcgcgttcggtcatgggctctcgtataccaccttcgccattggcgaaccgcgtctctcgcggaccggcatccctgcccgcgctttacgcgccggcgatacggtagaagttagtgttacagtggcgaacaccggagcccgtgaaggcgatgaagtggttcaactgtatgttcatgatctagctgcgtctgtagcgcagccagttcgtcgtttgcggggctttcgccgtgtaactctcgcggccggtgcaagtcgtactgtgcgctttcgtcttggtgcggatgacctaggcttttggaccaatgatccgaggggtgaatttctggtcgaggagggcgcgtttgatgtgtatgttgggaatagctcaactgcgaaatctaaacgccgtttaacggtgacctga

SEQ ID NO: 566 - DNA, 1317 bp, Artificial Sequence
  6xHis UPI0000EFCED2
atgcaccatcatcatcatcatgaaaacttgtacttccagggtagtgttgctggaaccaccaccagcctggccagcggcacccaaacctatggcggtgtaaccacgattgtagaaaccagcaccaccgtgacttgcccttatgcgaccgtaagtccatcagggagtactgtgacctccattattcaaaccacgacctacgtgtgcccggaagcgggcacgtataccatcgccccgactacgacatacgttccgagcaataccgttgttacgtatccgaccgttagcaccgttactccgggtacctatacgcactctgccatcacagtaacggcgactgtcacagattacacctacacatgtccctttgcgaacgcaaatgaaccgacgtcgacgcctgcggcggctacaaccagtgctgttgtagtgaccactccggccccggccacgacgacagctgctgcagtgacatctagcgtgcaatctagtaccgttgcgtcgtctagtgcggctgctagctcaggtgttagcgcgtcaggcaacagtatgggtatgacttacacgccgtacagcaattcgggcggttgcaaaagtaaagccactgttgaatctgacatcgaaacgattgccaacaaagggtttacccatatccgtctttattctacggattgtagcaccctagaatacgttggtgcggccgcgagtaagtacggtctgaagttaatcctgggagtctatatctcgtctactggcacgtcaggtgcccaggatcaggtgacggcgattaccgaatggggccaatggagcatggtgacgcttatcgttgtaggcaacgaagccatctcagatgggtatgcaacagcatcggaattagccactttcattagctcatgcaaatcttcgtttgaagcggcggggtataccggtcaggtcaccactacagaaccgattgatatttggcaggaatatggcagctctaccctctgtagcgttgtggatgttctgggcgcgaacattcatcccttctttaacagcgaaacgaccgcagccgaggctggtacctttgcagcgagcgaagttgcgctgctgaaaaaaatctgcacaaacatggatgtgatcaacctggaaaccggctggccgagtaaaggtaatgccaatggtgcagctgtaccgggcgcgaccgaacaggccaccgcgattaaagggattcgtgaaagcgtaggtgagttaagcgtgtttttctcgtacgcgaatgatctctggaaagacccgggcgaatacgatgtggaacagtattggggctgcatcgatcaattctga

SEQ ID NO: 567 - DNA, 2331 bp, Artificial Sequence
  6xHis UPI00000D8BFA
atgcatcatcatcaccatcatgaaaatctttatttccagggttcaatgagtccacgaaccacacgtcgccaactgttaggtggcgcagcagcattaggtttactcgcgcgtattccgactgggtgggcgctgccaagcggtgcggttcgcaccccggccttcatagatgctttaatcgcgcgcatgtcagttgaggaaaaagccggccagctgtccctgttttcgagcgcgcaacaggacggtaaagcaatagttgcgaatccccttgcccgtagcgcagatggcgatgaccaattagctgccgcgcgtgcaggtcgcttgacgggcgtgttcaatggcagcaacgtgagatggcatcagcaactgcagaaggccgccctgcagtcgcgtctccgcattccactgctttttgcggccgacgtgattcacggttataccaccgtgttccctgtgcctctggcggaagccgctagctttgaaccggatctagcacgccgtaccgctcgggcagcggctatggaagcctctgccgtaggtcttgattggacttttgcaccgatggtggatattgcccgtgatgctcgttggggtcgtggcgttgaaggcgcaggggaggatgtcttattagcacgtctgtttgcgcaggctcgtgtccgtggttttcaaggtgacgcgggcctggcgaatccagacgctatggcggcatgtccgaaacatttcgcggcatatggtgccgcggagggtgggctggattataaccgcgtcgacgtttctgaacggaccttacgcgaggtatattttcctccattccaagccgcgttcgctgcaggggccgtgaccacaatggcagcgtttaacgaactctcaggtattccagcgaccgcgaatgtgtggctcttggatggtgttctcagacaggagtggaactacccgggcttggtcgtaagcgactttagtgccgatcaagaattggtggcacatggagtggcggcagatgatcgtgaagcagctcggttagcgttcatggccggtgttgacatctctatggaaagcggcctgtacttgcgctatttgccggctctgtttgccgccggcgaggtgccgatggctcgcctggacgcatccgttcgtcgtgtcctgaccttcaaagccgcgctgggtcttttcgacgatccgtttcgccgaattcgtcctcgtttagcgcaaagccgtcagcgccgcgcagaaacattggccctggcaagggaagcggcgtgtaagagcgtggtcctgctaaaaaacgacggggaacttttacccctacgtcgttctggccaacggattgccctgattggcccaatggcgagggactggctgaatcatgccggcccgtggtcgttattcgacgaggaagataatcgtaacaccctggccgcggcccttagtggcgcgttagatgatccgaccgcccttcgcgtcgaagatggctgcggcttcgatcagaccctaccgggtggtgtacaggctgcggtagcggcagcaggtaacgcggatgtagccctgcttgcgattggcgaacctctgtcttattcgggggaagcccaaagccggaccgagatttcaattccggaagtgcagcaacagttattggcggccgtcatcgcaacgggtactccagtggtagtattactgtcaaccggtcgcgcccttgcgttagagggcccagttctggcctgtgcgtcaatcctggtttcatggtttttaggctcggaagcgtcagcggcagtggccgatatcctgtttggaaccagggcgccgtcggggcgcctgcctgtatcgtttcctcatgcggccggacaggtgccgtacttttatgcgcacacctccagcggtcgtcccaatcctcagccggacgtcctggaaccgtataaaacgcattatcgaaccgttcctaatactgcgctgttcccctttggccacggtctgacgtatggccgcatcgaatatggcgaattacgactgagtgatacccgaatgactgcaacgggcagcttacgcatcagcgcccgcatccataatcgcggtactcgcgatgcagaagaagtggcgcagttgtatatccgcgatcgctcagcgagtgttacgcgtccggttagggagctaaaggatttccgtaaattggcggtcccagcgggcggctcggtggcagtggagtttgtgctgcgtcgtgaggacctcttgttcattggtcaggcactgcagccaaccgtagaacctggcgtctttgatgtctgggtagcaccgtctgcggaggcggctggtgtaagcgcgcgtttcgaattactggaatga

SEQ ID NO: 568 - DNA, 2433 bp, Artificial Sequence
  6xHis UPI00019C9CD7
atgcatcatcaccaccaccacgaaaatctgtacttccaaggcagtatgggtgtagtcgtgtctaactttcatctggctaaaatcacggcggaagaaaaagttaaactgaccagcggtaaggacttctggacctcagaacacttagccgataaagggattccgagctttcgcatgagtgacggtcctcacgggcttcgttaccaggcgctggcagcggatcatcttggcattaatgatagtgttccgtcgacttcttttccaaccgccagcgcgtcggcggccgcctgggatccggaccttatacaagcgatgggcaaagccattggtttggaggcgcaatcgctgggagtggatatggtgctaggcccgggtgtcaatatgaaacgtaatccgttgtgcggccgtaacttcgaatactttagtgaggatccattcctggctggcaaattaggtgcagcgtggattaacggcatccagagccagggcatcgccgcttgcctgaaacactttgcagcgaataaccaggaaaacgaccgcctgagttcagatagtctggtcgatccgactgctctacacgaaatttacctggaagccttccgcattgcagtgaccgaaagccaccctgaagcggtgatgtgtagctataacaaaattaatggcacctacgcgagcgataacctgtatctgatgacccaggtgctgagacagcagtttggcttcggtggtgctgtcattactgattggggtgcgctcaatgataaagtagcggcgctgaacgccggtaccgacctagaaatgccgggtgacgatcacctgtttgacggcgaagcgctgcaggcgtatcaacaaggtacgctgaagttagccagtctggatagagctgtgactaaaattgccgaaatcgcccgcaaacagcgcccaaaattccagggaagtcgtgaacagctgcttcaagcgaacggccagttggcacagaagatagcagaaagtgcaattgtcctgttaaaaaacgaagccgcgctcctacccctgcaagcaactgataccgtggcggttatcggtgagctggcgaaagctacgaggtttcaaggtgcaggttcaagtcacatcaatgcgtccgaaattgtttcagtcctcgatggcctcaaacagaaaaaagtctcgtttgattacgccgcaggatatcgcctggatgatcaggacgatagccaggcaaccgccgaggcactggccctggcgcgtaatcatgacaaggtggtttttgtcgcgggtctgcctgataactatgagtccgaagggttcgatcgccagaatatggcgctgcctaaagtccagaacgatcttttgcaggcagtaaccgctgtcaatcccaatgtgattgtgttgctcgtggcgggcgcacctgtggagctcccttgggtcgaccaggtaaaagcggttgttaatctgtcactgggcggtgaacgtattggtgccgcagccgcgaatgtcctgacgggggctgtgaaccctagtggaaaactggcagaatcttatccgttgaaataccaggatgtaccgagcgaggacgtgtatgataaaaacccgcgctcggttccatacgttgaatcgacttatgtcggctaccggtattacgacaaagctaaagttcctgttgcatttccgtttggtttcggcctgagctacaccagttttgccctaaaaaatattcagctgtcctcggatcacgttaccgacgatcagcccctcaccatttcattacaggtgacgaacaccggcaaagtggatggcgccgaggtagttcaggtgtacgtgcaggaacagcagccgcgtcccctgagacctgaaaagagcctgaaagcatttaagaaagtctttgtcaaagccggccaaacagtgaatgtggcgttagaattgaaagcacaggcctttaaagaatggcgcgaacagacccaaacatgggtcctgccggaagcccagaaagcgatagctgttggcacgagcgtcacgaatatcgatgcagtactgccggtatcctttactggggaaacgttcaacaattttgcgaccattccgaattggtatacgacgctgtccggtaaacctagcgttcaagattttgaacaattgacggatcaaaaggtgccggcgccgcacgaatttgtgccgggagaatttacgcgtctgaataccccgcgcgaaatgaaaaaacactcgttgctgttgcgcattgtggcgtggatcaccgtgaaaattcgcaccaaagattatatcgacaagcagggtccggaagcaaagtttcaacaagccatcgtactcgatacgccgctcattcgtcttgcacagcaggctagcggtgcactgaaattgtctatggtagatcgactggtcgccgccgccaaccaccaatatgtaaaaatgattttccgctga

SEQ ID NO: 569 - DNA, 2514 bp, Artificial Sequence
  6xHis UPI000BC490A3
atgcatcaccatcaccaccatgaaaacctgtatttccagggctctatggcgagttcacgcgtaaccgaactgttggctaatctgacgttagaagagaaagtgtacctcctgtccggctctgacaactggcgtacctttcctgtgccgagattaggtattccggcggtaaaagtgactgatgggccgataggtgcccggggcgatagctttaacacagggcaaaatgctgcgtgtttcccggcgccgatcgcaatggcatcgacctgggacaccgaccttctgttgaaagtaggaagcgccttaggtgaagaggctaaaagcaaagcggcccaggtgcttctggcgccaaccatcaacatgcatcgcagtcccctcaatgggcgcaatttcgagtgctactctgaagatccgtttctgaccggtaaaatggcaaccgcgttcgttagtggtctgcaaagccagggtgtggcagcggcggtgaaacactttgcatgtaatgatagcgagtttgaacgcgattcgatttcgtctgaaattaccgagcgtcccttccgagaaatttacttacgtccgtttgaaatggtagtgcgtgatgccgatccgtggtgcatcatgacatcatataacaaaattaacggtgtttttgcctcggaaaatccgaaactgctcaaggaaattctgcgtaacgaatggaactggaagggcatggtcatgtctgactggtttggagtgaagagcactgttcccagcgtgctgaatggaaatgatttggaaatgccgggcccccccgcatggcgtggcgagaaacttcttgccgccattaagcagggagaactcaaagaagaagatctgaacgaaagcgtccagcgggtactgagttttgtggagcgcgtgggtaaattcgaagatcctgaagaacgtccggagacctacctggcgaaacctgaaatcaccgagttgatccgcaacgtatcagccgattccattattttggttaaaaacgaacagtcgctgcctctgaataaagacgcgcttaaatcggtcgcaatcattggtccaaatgcgaaaactgccgtaaccatgggtgggggctcgtcgaaagttcaagcaccacacgaagtgaccccgtacgaaggaatcgcagccgcgttaggcgaagatgtagatatccgacactccgtgggtgcgtacacccataaactgattccgcaattagatgaccgcttacagactccggatggtgaactgggctacatcatggatgtttacgaatcaaaaaactttggggagaccccaaccgattcaaaagtactgaataatacacgtgtgattatacacgatgcaggcttcaaagatgtcgattttcgcagcttcagcgccaaagtgcgcgcccgctataccgccaaacataccggcccacatacattcggcatcgcgtctgttgggctgagcaagttatacgttgacggtaaattagtgattgacaattggacatcccaagtacgcggtgatatctttttcggctttggctcccgcgaagaaaaagcacaatatgatatgatcgagggccagacctatgaaattctcatcgactatatgaccggccatgagctgatggccatgctccgcttcggcctgttggaaccattggcttcggacgtggtcgagcaggccgttaaagtggcggaaggaactgacgtggcggttgtagtagtgggtcttaataacgagtgggagactgaaggctatgacaagacggaattggaactgccgggtggtcagaacgagctcattgaggcggtagcgaacgtgaacaaaaatacgattgtcgtagtgcagtgcggctcgccggttgttatgccgtggattgataaagtgagcggcgttatagttgcctggtacggcggtcaggaaacaggtcatagcatcgctgatgtgctgtttggcaaggttaatccgagcgggcgcttgacgcaaactttccctaaacgcctggaggataaccccgcatttgataactatccgggggagaacggtaaagtgatctacggcgaaggtttatttattggctatcgttactaccagcgccgtaaagttgatgtttttctaccgtttggctttggtttgtcctataccacgtttgactacggcaacattaaactggataacagcgaactcgacccgcaagcgcacattactgtcagcgtggatgtaaccaatacgggatcgattgcgggcaaagaggtggtgcaagtttacgtccacgataatcatcctcgccttagcagaccgctcgcggaattgaagggtttctccaaggttgaattagcaccgggtgaaacccggactgttcagattacactggacaaacatgccgttgcgttttacgatgataaggaagcagtttgggttgcggaggcgggcgaattcgaactgcacattgggtcaagctcagctgacattcgaggtaaagttccgtttacggtgaccaagagcctgagctggaccttttga

SEQ ID NO: 570 - DNA, 2469 bp, Artificial Sequence
  6xHis UPI000CC31AE2
atgcaccaccaccatcatcacgaaaacctgtactttcagggctcgatggcacttttagccggtgatagcttatggaccgttcctggtgtgccgcgcttgggcattcgcccgctgaaagtgagcgatggacccgctggcgtacgcgggaatcgcatcttaccggccgcagcgtttcctgccccggttttactgggcgccacttgggatccccagctcgtgcagcgtattggggaggctctggccgaagaagcggaaacgaaaggggcgcaggtcgtactggcgccaaccattaatattcagcggaccgcgttagggggtcggaattttgaatgtttttctgaagatccatggctgacggcagcattagcagtggcgtatgttcgcggcttacagcagcggggtattggcgcttgtgtcaagcatttcgtcgcgaatgatcaggagttcgaacgcatgaccgtctcgattgaggtggatgagcgttcgctgcgcgaaatctatctgttcccgttcacggtcgctatcgcggaagccgatccgtggtgcatcatggcagcctacaaccgattagccggcacttactgctccgagcatccgtggctgttgacgaaaatcctacgtgaagaattgagctatacgggtgtggtcatgagcgattggtatgcgacccactcgacagttgaagcgttattggcaggactggatcttgagatgcctgggccgccccagtggagaggcgaaaaattgcgtgtggcggtagaacaggggcaggtacctctggaggccattgatcgttcagtacgtcgcgtgttacaactgtaccagcgtgcaggccgcttagagccgggcgccgaaaccactcctgaacgctctgttgatcgcccggaacaccgtgcgcttatccgcgaagccgcggcgaccggtatggttttattacgcaatgacggcattctgcccctagacctgagtgcgtatcgtagagtagctgtgataggcccgcatgcgacacgtcccgccgtcggtggtggcggcagtgcgtttgtgcgttctcatcgtattgttacaccgattgaagcgcttcgtgcggcggcccctgaaacggaattcctagtagaagaaggcgcagcaatatacaaacttatcccacctttagacgcaagccaactgggggaagaaggtgtggaactgagcttttacgccgataccgaatttcgtggcgaacccgtggcaaccgcgcgtgtcgaaacgaccgatctgatatggctgggcgatattgctcctggcgtggacccgaccgccttttcagcccgaattcgcgtcgttctcagacctgcagaatcgggccgctatacgctgggtgcgacagccgtgggacagattcgcctgttgctggacggtgcactggtcctggataactggaccgccccgcagccgggtcgtacatacttcggttttggctcagcggaggtgcgcgcggacgtagaactggaagccggccgtccgtacaatctggtcgcagagtaccgtaaggcacagccggatatgccgttggcaggtttacgttttggcattgtgcaagccctgagtgaaggggaacgcattgcgcgtgccgtacgtgcggcctgtgaagcagatctagcgctggtgttcgtgggcttgaatccagagtgggaatccgagggttttgatcgtgaatctttcgaccttccgggagcgcaaaacgatcttgttcgagccgtggccgcggtgaaccctaataccgtggttgtgttaactgcgggatcgcctgtccgtttaccctggattgatgctgtgcgtggactgttactagcatggtatgccggcgaagaagtgggccacgcgatcacggatgtgcttacgggtcgcagggagccagggggcagattgcctttttcctacccgcgtcgtctggaagatacccccccatttcattcatatcctggcgcctttggacgtcttcactatagcgaggaagtttttgttgggtaccgctggtatgatgctagggacattgcacctctgtttccgttcggctatggcttaagctacacccaattcgcctatcgcgatttaaccctggaccgtgcgaaactagaaccgggtgaaactttgcaggttagctgtactgtcgaaaacattgggcgtcgcgaaggctcggaagtggtgcagctgtacatcggctttccggccagcccggtccgccgtccaccgaaggaactgcgtcgctttcaacgtgtgcgccttgggccctctgaagcgaccactgtgacctttaccttggatgcccgcgatctggcatattttgatgaagcggctgcagcgtggattgcccccgcgggctcatacgaagtgcttgtcggagcacatagccgcgacattcgcctacgtggtctttttgaactgcgatcagaaggacgttggggtgcgggtgatcggttccgtcattga

SEQ ID NO: 571 - DNA, 2682 bp, Artificial Sequence
  6xHis UPI000D26C9C6
atgcatcaccatcatcatcacgaaaatctctactttcagggtagcatgcgcagtgaaccaccgtatcgcgacgctagcctgccggtggctgaccgtgtagcggatttactgggtcgtatgaccctcgaagagaaagccgcgcaattagcagcacctactgcgcccgccattgatgtccatgatccgcctcccacgggctggggtgctgttgtagccgccttgagcacgctggaacgttcaccgcgtgaatccgcggcagcagtcaacgagcttcagcgcaaacacgttgaggatactcgcctcggtattccagtgctagtggcggaagaagctcttgtgggcctgaagattcagggtgctactatgcacccggatgccattgcacaggcagcgacgtgggaccccgaactgatcgagcgtatgggtactgctatcggaacccagatggcccgcacaggcgtccgacaggccctgtccccgttggccgataccgcacgtgacccacgatggggtcgtgtggaagaaacttacggtgaagaaccgtatctggtgggcagcatggcgacagcattcgtgcgtggcatgcaagaagccgacgctgggacacctctcgtcgcaacagtgaaacatttcctgggctattcagcaggcgccggtgggcgcaacaccgacagtgtcagtattggccctcgtgagctgcgtgaagtacacgcggttccttttgaaatggttattcgagacggtggcgcccgtggtattatgcccgcgtacgtggatattgatggcgtgcccgttaccggctcgcgtgcccatttgacgggactgctacgtgatgagcttgggtttgacggactggttatctctgatttaggggccgtcaatcaacttcatacgaaacatggcaccgctcactcagatgccgcggcgagcgcccaagccgttcgtgccggagtgcatttagatctggttccgcgcttagccacaggtcatctgattgaggcggtcgaaagtggacttctgccgatggccgatcttgatctggccgtgtcgacggttttgcgtaccaaatttgaattgggtctttttgaacggccatacgtagacctagaagccgtgcctgaaacgctcgatagcgcagaaacacgtgggctggctcgggaaatcgccgaacgttccgtggtcctgctgcgtaatgaacctgtgaatggcgttccgctactcccgctggatcctggaacggcaaccattgcagtgattggtcctaacgcggatcgtcttctgggccagctggggaattattcgtatcccgttctggattcgatggccaaacgttttgccctggcggcagaccccaccgcccgcgccgatgaagccgctgaattcggcggtagcacgggtgccgacagggcacgcttaatggtagagagcgtcccggtagtaacatttttggatggcattagagatcgggctcgtggggcgactgtgttgtatgaaccgggttgcccgatccaggacgaagatcgtagcggcataccggccgccgtggaagcggctcgttcggcacaagttgcggttgtagttgtcggcgatcaggcgggtatcaacgcctttggcaccgtgggcgaaggccttgattcagccacgtgtgaattgccgggtgtacagcgcgagttagtggaggccgtagcagccactggcaccccgaccgttgtagtactgtcccacggtcgtccatatagcttacgttggatgaccggaagtgtaccggcgattgtgacgtcatggtttggaggtgaagaagctggttcggccgttgccgcggtgcttttcggtgatgtgaatcctgctggccgcctgccggtttcatttttagatttcgcaggtagtgccccgcttccgtactggcgcgcagcgcagacaccggcgtatgtagaaggcagggccggtgcaactttcccgttcggtcatggtctgagctacaccaccttcgcttatcgtgatctggacatttcacgccctgaggtaccagcggatggggaaattgaactgtcttttaccgtcgcaaatgtgggggatcgcgcaggcgatgaagtggtgcaggtgtacggccaagacgtcattgcgcgtagcgtacgccctcgtcgtaaactagtcgcctttcgtcgagtaagtctggaagccggtgcggcggtacgtgtgaccgcaacggttccggcgtcaatgttcgcgttatgggatccggaggagggctggttggttgaacctgggaaaattaaactgttcatcggtggaagcagtgcccaaattcatcttcgcaccagtgtaaccctgactggcggcgtgcatcatccgggagcggatcgtgccctcaccagcagcatgagcgtgatccccgttgatccggaaacagcggcccgaagcgcagccgcacgtgcagcggcgttgcgtactgctgcacctctgagcggcgacaacaccgtcttagaatggcttgaacacccggttggaggggatctgttacgtggcctgttacagggagcggacgaggaaactttagccccggcatttggcatgagcctacagcaaatggccctgtactcgggggggcgcattgcccctgagaccgtagaaaggcttgtcgcacaggtccacgcacaaatgacagctccacagcgagcatga

SEQ ID NO: 572 - DNA, 1446 bp, Artificial Sequence
  6xHis UPI00024F22B8
atgcaccatcaccatcaccacgaaaacctgtacttccaggggagcatgagcatcatctccaaagtgcctaccgactttccggagaactttctgtggggtgcgtcgaccagcgcatttcaggttgaaggagcggcctttgaagatggcaaaggaatttcagtagccgaccttcgcgccaaaaaatctaaattcttggacactagcgtgactgttgatcattaccaccatctggaagaagatgtccgtctgatgaaagaactgggccttaagtcctaccggttctcaatctcatggacgcgcatctatccaaatggcaacgatctgaaaccgaacgaaaagggtttggcgttctaccacaaattgattaatctgctggtggaaaaccaaatagagccgattgtgacaatctttcacttcgatctcccgcagcagttagtggaacagtacaacggctgggcggatcgtcgctgtgttgatgactacgtgtgctacgccaagctgctgttcgaagaattcggcagtcaggttaactactggttgaccatcaacgaacactctttattagtgaacgtacccagtatgattggtctgcattccgacaacatgaaggaacttcgtcaactagctgagaacgctaattattacatgttcctcgctcaggctaaagtctttaacctttgtcatgcgatgcttcctaaagcgatgattggcccagcggtgagttacatgactaacctgccttaccagcacaaaagcacggacgcgcttttgggtaaatcgttagaggatgttgttagctttctgacgatggacgtagcggttcgcggcgaattccctagctattatctgcgtaaattgcaggaagaaggcttaaagctgccgtatctgccggaggatgaggcagtatttgctacagggcgggccgatttcctcggcttgaactggtactgcacatccattttccgcgaaaatgaacaggcgtcaagcaaaatgcttaagggcgtgattgaccacatcgagcgttacgaagatccagacctgcagcataccgattggggcttcagctatgatccggtgggactgcgctatgctctgcaacgggtccacgatcgttttccgaacctgccgctgatgatcacggaatgtggctggagcgaacgtgaaaatcttgaaaagggccaggtacatgatacgacccgcgtgaactttttgcgcgatcacattgcacagctgcgagaagcaattcgcgatggtgtgaatgtattgtcgtttaacccgtggagctttattgacctgctgtcagtgggcgacggcatggataaacgttatggcctgatttacgtggaccgcgataatcacagcgcgaaagacctgaagcgctataaaaaagacagcttttacttctatcaaaagaccattcaacagaacgcgaaaaacatccagtga

SEQ ID NO: 573 - DNA, 1653 bp, Artificial Sequence
  6xHis UPI000E020871
atgcatcatcatcaccaccacgaaaacctctacttccaggggtctatggaactgagcaaccagaaactgttcaatgaatatttacaaccgtacgaagcagcggtggaagctaactgcgaattggttatgacagcctttaacctactgaatggcgtccctagcacaggcaacaaatggctgaatcgcgagattctgcgcgaacgttttggttttaatggagtgctggtaagcgattatgccgcggtacaggaactggtctttcatggctttgccaaagatgaacaggatgccgcaaagaaagcattggaggcaggtgttgattttgatatgatgacggcggtttatgctaatgcgctgcccgaactggctaaggaccgtgccttcgcggaactcttggacgaggccgtctggcggatcctgatcctgaaaaataaactaggcctgtttgagcagccgttccgcgggctgacagaaccaaatacgggtgaggttctcacagatgaagcgaaggaggttgcgacgaaattagtagaaaagagctgcgtgctacttaagaatgaaacggccctgccgctcaagaaaacaaaagaccaacgcattgcagtgatcggtccctatgcggaatctcacttcacgttgggattctgggcttctgtaagcggccgttcgtctgatgtgcttaccctgaaagccggcctgcttgaacaatttggacaggatctgctgctgttctcccgtggctttaatctgtatgaagactattcgtcgtttggcccattgaaagcgggctttgaacagctgaacgggcctatagaagacgaagaattccttctagagcagtcgctcgaacaggcaaaaaaagccgatgtcatcctgctcaccatcggagaaaacttccttgagagcggagaaggtgcttcgaaaaccaacttacgcctgccggaaaaacagattcgcctgattaaaaaattggccgaactgaagaaacctattgtaggactgctgtacacaggccgcccgttggtgctgaccgaagttgaatcgtattttgactccttactgctggtttggtttccgggtgttatgggtggtcgcggcatttgcaatttgctggtcggtgaagccagcccgagcgcgcgtctgaccatgacgtttccgaaatcagaaggccagattccgatttatagcgcacagacgtccactgggcgcccgcttggcgaaaacgcccattctgaacgcttcgtgtcgaaatacattgatgagacaaacgaaccgctgttcagctttggaagcgggaaatcctacgccgattttgaaggagcgtggcagggcgttgaagagaagacagacggtatccattgttgttacgaaatcgttaatcagagcgagcgtgaagcgtgggtgacaccacagatatttctgctgaatcatccggcagaaatcgtccgtcctatgaaacgtctcattgcgacccagcatttcctgctggccgcgaaagagcgaaaggtcgtaaccttcaccctgagtgaagaggaattcacctacttcgataatgaaggcgtacgtcatttgaccagcggcaactataccttacaactggacttactgggtattaagaacaatcagaccttccacctggtaaaaggtgaatga

SEQ ID NO: 574 - DNA, 1590 bp, Artificial Sequence
  6xHis UPI000DD17A7D
atgcaccatcatcatcaccacgaaaatctgtacttccagggctcgatggcgaagatattccgcaaatttaatgaaatgctgcatcagggtggctatgatcaggcccatgtcaaagtggtaccgtgggatcacccggtcggcaatcgcgttaagtacctgttccgtaagcaacgcggcgtcaatttgggcagctggtttgcattagagagctggctgacaggctcgctgtttaaaaacgcaaaggaaccgtcttcgtgcgatatcgatctggtgaaaggtatgaaaccagatgacgcgaaagcgctgctggaggaccattgggataactttattaacgacggggactggagctggatgaaagcccacgggatcaactcagtgcgtattccgattctctatccccacttcttagctggcaacccaaaacataaaaaacttctgaagggcactgaatatggcccgtatgatttcgtgtatgaaggtgcatggaaacgtattgtgaaagcgatagaaaaggcgcgctccctcaacattggcgtgctgatagatgttcatggggtacccggcgggcagaatggcgatagtcattgcggtaaaagtgatggtaatgcaggtttctggcatggtagccatgcgagcagcaatcgtaaagtgacgattaagatcctggtggccctggcggaagcgattagctgctttgaaaacgtgatcggcttagaactgatgaatgagcctcaaaaccacaacgcactggaaagtttctatgccgaagccatcaaaagcattcgttgtagcagcaaacccgacgctgcgagcatgccactgtatgttggagacgcatgggacaccaatcattacacccattatgttggtaagcatacttcttgcgacaatccgttagtggtggaccatcacctgtatcgctgcttcaccccgaacgatcataaaacgactgccgccgcacacgctaaccacttggatgttgagcatcacggtaaaaccgctgtttggttggagcacatggcgaacaatgccaaaaatagcattatcattggagagtggagcggcgcactgaacccgggcagctttcagggctgcaacggaaaattagaagcccggaaacagtggtcattagcccagtggcgcgcgttcgaaaagttgaccgcgggatactattattggacgctgaagaaagaaggtggaccggatccaggctggtgcctgtataccgctatcgaaaaaggctccatgccgccatccctaaacccgttggatgatactcatgtggatctaaatctgctcaaaatcgagggcgaaaaatgtcgcgaacagggttatatgaagcatgtaaagtactgggacaacaaaggcggccacttcgatcatgaacagtataatgccggcttcaaagtcggttggttcgatgctctggattttctcgccgacggtgcagaaattggcctgccgtttcaactggtgcagtatcggattaagagctatcgcaaggatcatgaccacaagtttatttgggaattcgaacacggctacacccaggcgttaaacgcctttcgacgcgtgctttatgcctga

SEQ ID NO: 575 - DNA, 2625 bp, Artificial Sequence
  6xHis UPI000FA2DE87
atgcaccatcaccatcaccatgagaatctgtattttcaaggcagcatgagcgaaacctcagcgtttacagattttgatgtggcggacctggaaaaagcaaccctgctgagcggcaaaaatggctattcaagcgcatgcctgccgcaacatggcattccgtcgctgcgtatgagtgatggcccatcagcatgtcgcggcacgacctctgtccctgaactgggtctgtacgcataccagccgtctgttttcaatggtaccccgtcgaattgttacccctgttccctggggctgggagcgtcatttgacatagagttagtggcggatgtagcagggcagattgcgaaagaggcgcgagcgaaaaatgtgcatgtgttactagccccgacggtgaatttggtgcgcagccctctggcgggaagaggctttgaatttttctcggaggacccctaccatgcgggtatgatgggtgcagcgcatgtgaaagcggttcaagcccagggtatctcggcgtgtttaaagcacttcattgcgaacgagcaggaaaccgaaaaacactccaatgacagtatcgtgagcccgcgtgcgctacgcgaagtttatctggagccgtttcgtatcgtccttcacgaagcgagcccgctgagtattatgacgtcctacaatcgcctgaacggactgcacacctcagaggataagtggttgttgcacgacgtgctgcgtcaggaatggaattggaaaggtacactgatctctgattggtatgggacctatagctgctcaacctcgatcaaagctggcctggatattgagatgcccggcccggcgttatggcgcgcagcaccacagattctgagcctgctggaagcgggcaaaattacaacgaaagatatagatgcctgtgctacacgtgttctctctttggtgaagcacttgctgaaaagtggcctgctgttcgaagatgtggaaaacattgttgacactccagaatcgcgtaatctgctgcgtagggcggcggcggatgccatcgtactcctgaaaaacgacgctaaagtcctgccgattgatccgtctaagctcaaacgtattgcggttattggtctgtcagcagcgatggctcacacctccggtggcggggctgcctcggtgcccaccgaaacctttacggtgagtcccctggcgggcattaaaggtgcggtggaacctctgggtattcaggtcgattgggcaccgggtacgtcaaactatcgctttactccgccgctggatccgtatttggtgggagcggcgcaccctgtagagattgagttttggcgctccgaaccgcatgcacagtggaaggatggcgtggcgggagtcattcctagttcggcggccgatcatgtcctacgggtttccacgaccaaatgcttcatgcatgatggcgtgccggaggacatcattaataacgcccgtcacgtgcgcctgcgtacaatctttaaggcgccattaaccggtcagtggaaattcggtattagtagcattgatcagtgtcagttcttcgtagatggcacgaacattgactatacaactaacttgggcaaaggcgaactgttctttggcttctgtcacgaagaacgcagcattgtcatggatctacgccagggccaggaatacaccatcgaacttcgatgctgggcaaccggtaaaatggatagtctgccagtaaaattttctgcggggtttcagatcggcggcgcgcccgcgttggaaccgcaacaagcaattgtggaggctgtggaactggcacagagcgccgacattaccatcgtcgtggtgggccttaacaaagattacgagaccgagggtaacgatcgtgatgatatggacttaccgggcaccgcgaatgatctggtcaaggcgatccttgccacctcccaggacgttgtcgtagttaaccagtctggcatgccggtcactatgccttgggcggatgatgcctctacgctgttgcaagcattttatggtggttcaaatcttggcaatggcttagcagatgtgctttttggtaaagtcaacccaagcgggaaactgccggtgacgtttcccagaacactgggcgatacgcctacagcgaccggctatggcaccaccgcagcctcagttacgaaagcgtattaccaggaagatattttcgtcggctatcggcattttgaccgcacagctcgcctacctctgttcccgtttggacatggtctgagctacaccaccttcgagtattcttccttaacggcgacaaacccggacggtcaggaaggaaaatttcgtattcaattcacgattaaaaataccggccacctgttcggcaaagaagcggctcaggtgtacgttgccgatgtcaagagctctgtcgttcggccttgtaaggagttaaaggccttccgcaaagttgccttagagccgggccaggcctcggaagtagttattgagctggataaacgtgcgttgagtttctgggaggatagtgaagaaggcggctggagggcggaagccggagtcttcgaggttctggttggtccgtcaagcgcgtcactgccactgaaagtcgagatcacattggagcgcgatattgcgtggcgtggactgtga

SEQ ID NO: 576 - DNA, 2523 bp, Artificial Sequence
  6xHis UPI0010355193
atgcaccatcaccatcaccatgaaaatctgtatttccagggcagcatgaccaccgcaaatcgtgcggcgcatgcggcagacgcggccagagagcctcaggtcgaagcggcgctggcacgcttagatttggatggccgtattcggttgttaagtggagcaaccatgtgggccattgcccctaatccggatattggcctggaacgtcttgtgatgagcgatggtcctgttggcgtccgcggtgaacattggactccagatgatccggccctccagttaccaagcccaactgcactggccgctacatgggacaccgaactaattcggaccgtggggcgtaccctcgcccaagaagccagacgtaagggcgttcatgtgctccttgcccctacagtaaacatccatcgcagccctctggggggccggcactttgaatgctacagcgaagatccactgctgactggtcgcattggtaccgcttatgttgacggagtgcaagatggcggagttggcaccaccgtgaaacactttgtggcgaacgactcagaaaccgatcgcttcacagtcgatgttcgcgtggatgaacgcacgctccgtgaaatttatctggccccgttcgaagccatcgtggatggcgcccgtccttggggcgtcatggccgcatacaatggtgtaaatgggacaaccatgactgaacatgcacgtctgaatgcggttttacgagacgaatggggcttcgacgggtttattgtgagtgattggaccgctgcccgcgatacggtcggctgtgccctggctggcatggacgttgcgatgccgggtccgagtacagtttatggcgaaaatttacgtgcagcggtacgtgaaggacgtgtgccggaaggcgcggtggaagcgatggcgcgtcgcgtgttgcgtcttgcggctcgcgtaggagcgcttgagggcgcagaaccggccgtggcccctgcggcattaccgccggcaatcgatggtcgcgcggtcgcgcgtgaggcagcggcccgttcatttacccttctgcgcaatgaaggccgagcactgccgatcgaccccgcgagagtcggctctgtggcactgattggcttggcggctgatgaagcacgcacgtcggggggtggctcagcaacagtgtttacggaacacacagttagcccccgcgaaggcctgcgcgcggcactgcctgaaagtgtgcgccttgattacgccgttggcgccgacccgcgtgcctctttacccccccttgcagggcctttaacagccgcgtttcgcgacgctgatggtaccgtgctagccaccgaacgtctcgcagatggcacagcccgatggattggtgaactgccggatggtgtgaccgcggaaggcctgagtaccattgaagtttcgggcaccttgacccctgcgtacaccggcacccatgttttcggtgctaagggtgtgggtcactttcgcttagcagtgggtggtcgtgtgggattcgatggtgttaatgaagtagatggtgacgatccgggcgcgggctttctgaatccaccggaatcgactgcggagtttgcgctgactgcgggcgaagccgtagaagtttccgtagtggcgactgtgccaggagtgagcgcagacttcgcatttattgggttctcactgaaccatagcgaaccacgagccggtgatgacgaactcatagaagaggccgtacgcacggccgcaggcgcagatgttgccattgtgattgccgccactaccgaggaagtggaaagtgaaggttttgaccgtgacagcctagagctgccgggccgtcaggatgaactggtttcaagggttgccgccgcgaacccccgcacagtggcggtagtaaataccggttcgccggttgtcatgccgtggcggggcgatgtggcagccgttttactaacctggtttggaggccaggaactcggtgccgcgttagctgacgtgctgctcggagccgaagaaccaggcggccgattgccgacgacctggcccgcagaacaggctgatgtcccggtaattggggtacgtccggatggcggcgtgctggaatatagcgaaggtgtgtttgtggggtaccgagcgtggcaacgcctgggtgcggagccagcgtattggttcggacatggtctgggttacaccacatgggattataccggtgccgatgccgctgtgcgtctcgacggtggcgttagtgttaccgctcgtctagccaacacaggggcccgccgcggccgagaggtggtacaggtctacgttagtccgcaggaagaaggcggggcaccggagcgcccacgccgctggttagcgggttttgcaccagtggttgccgaaccgggcgcctcggctgaagcggttgtagaagttccggcccgtgcctttcaagtgtgggatagcgctgcacatgattggcgcacggttccgggaggttacgatgttcttgttggacgctcagttgcggacacccccgtaagtgcgcgtgtggaaatcgcaggttga

SEQ ID NO: 577 - DNA, 2262 bp, Artificial Sequence
  6xHis UPI00119640A1
atgcaccatcatcaccatcatgagaacctgtattttcagggaagtatgaaacaaaaggagctcaaagcgcttctcgacgatatgtcactggacgaaaaaatcggccagctggtgcagctgagcggtgaatttctgcaagcgaatgatatcagctatggtccgcgtgagaaattgggcattactaaggaaaccgtgaatctgatcggcagcgttctcaatgttgctggagctaaagtcaccaaaaaagtccaagacatgcaaatgaaggtgcagccgcaccacatccctgtactgtttatgagtgatgtaatctacggatacaaaaccgtatatccgattcccctgggcctgggggcaacgtggaatcccaaactggtggaaaatgcgttccagaaagccgcgaatgaagcgagcgtggcaggcatccaggtggcctatgcccctatgattgatgttgttcacgacgcccgttggggccgcgtcctcgaaagcccgggcgaagatccttatcttaatagtgtgtacgctaaatctatggtgaacggctttcaaaaaaaactaggagagaagcagggcgttgtaagttgcttcaaacattatgcagcttacggcgatgtggaaagcggtcgtgaatacaacactgtggacatgagcctgtcgaacctttttcagaactacctgccgccgtataaggcggcggttaaagcaggcgcgaaaatggcgatgacgtctctggcctcgttaaatggtgttccatcgaccgcggataaatggctgctggacaccgtattacgcaaggaatggggtttcaaaggtataatcataagcgattacgcctcgatttatgaactgattaaacatggcttcgcgggcaatatagaacaggcggcgaaaaaagccatcgatgcaggggttgacattgatatgaaatccccgtgttacgccaaaggcctgaagagcctggtcactaataacaaactggatgaaaaaaaaatcgatcaggcgacctggcgcatcctgtgcctgaaaaatgaacttggcctatttgaaaacccctacttcggtatcagcgaagagaaggagaattcgaagaaactgagcttgtccaataagaaattagcccgcaagttggcttcggagagtctggtgcttttgaaaaataaaaataaggccttaccgctgcgcaaagaagaaaacattgttctaattggcccgtatgccgattcgcgtcagctgctgggaatgtgggcaattcacgggaatcctcaggacacggtgtcaattctggaaggcatgaagaagtacagcccagacattaaagttgccaagggcacggatattaaccgcgatcgtcatatctttgaagaaatgggcttcttctcggaagaacagattgatcagatggttagcgcgccggaagttgaaaaagaaaataatcaggaagcgttaaagttagcggcgcgtgcggataccgtgattcttgccctgggtgaaaacagccttgagagtggcgaagccggagcaaaaaccaacctgtgtctgcccaacaaccagctgaagttaatcaaggatatctccaaattaggcaagaaagtggttgttttagtgatttcgggtcgtccgctggtcttgacaaacatcgtggataaagtagatgccattgtggagtgctggttcccggggacagaagggggcaatgctattgcggatgtgttatttggcaaagagaacccgtccggccgcctgagcatgacgttcccatacgacgtcggccaggaacccatctactacaatcacttttctaccggtcgcccgtatcacggctctcaacataagggtcgcttcgtgagcaaatatcttgatgcgcctgttgatccgctgtacccgttcggctacggtctttcgtacggtaagaccaagattaaaaagatcgagctgagtaacaaatacttgaagttggacgagaaagtggaagttaaaatcagtgtcgaaaatatttccgattgggaccagaaagaggccatccagctgtatattcatgacaaagtcgccggtctggttcagcctgtgaaacgccttatcgactttaagaaagtagacatactcaaacattcggaagcagaaatcagcttcgaaatttcacccgatcagctcggttacttcgataacagcggcaaaaaaattatagagaaaggcgagtttgacatttttgtgggtaaaaactcaatggaatgtctttctaccaagcttgagttaatctga

SEQ ID NO: 578 - DNA, 1152 bp, Artificial Sequence
  6xHis UPI0000EFD0AA
atgcaccaccaccaccatcatgaaaacctgtatttccagggttccatgtctgaactctattgtccgattccgcctcgtgatcaagatatttatcgctttcgtcagcaatttggcgcgaatctgggctctacgtttgtgttagggcctcatgataacaccggcgaatcaaatgagttgcagttattgaaaacgagtctggcgtcgactggcttagagcagacccgccaaaaatggcagtctcactggcatagtgccctgacggatgatgacctggtatggcttaaagacgtggcccaatgtcgcacgttacgcctcccattgtcgttttactctctaggcccgctgttttgtcgtggcactgcatttgaaggtgatccgagcgaagtgtatcaccactgctggagcaccgtgaaacatctgatcgaaaaatgctggttccacggtattggtatcctcattgactttcaggcgtccgccagcggcattaatctgtgcgcctcagcgaaagatcgcacgattgcccgtgattgcgtggcctttctcgcccaggaaattacgtttcattcaatgagtgcagttgtaggcctgagcgtgagtagtggttgcgaaccggctccagatatgtgcgaatgctatgatgaaattctgaaaatcgcgaacgcaattgatgcctgtctgcccgtgtacattgatgacaatcaagcgcagtgcaataaacgcgtgttcaagggctgtgagtcagacattccgcagttcaagtcggatattagcatcggcaaaatccagattccgtctcaaatgatgctcccggaaaccgaagtacgggagaaaatcaacaaagcaaaagccgagcgcagcggcttccaggagaaagtgctgtcacaggtgtcggagagttggggcagcaatgaacgccaaagttttgttcacggctggaacctggggtacgatgacgcgcttcgcttttttggtgcggcggtacagggtatactcgcaccccgtaaaggcgcggataaaatttacgatattgagctgtgggtacaacagcgcaaacgtgacatcgacccggaacagttaggtgagaattcagcagcatgggaagatggtctgcgtcgcggtattcaggacttctacaacataatcgggatctga

SEQ ID NO: 579 - DNA, 2547 bp, Artificial Sequence
  6xHis UPI000170BF91
atgcaccatcaccatcatcatgagaacctgtattttcagggcagcatggcgaataaaggcatggaccgctcatttatgaccgcttcagttgaagatttagtgcaacgaatgagcctgaccgagaaagtgtccctgctgagtggcgaagattggtggcgtacaacggccgtgccgcgtcttaatattccgagtatcaaactgaccgatggcccgaatggtgcccgtggccagtctttctttaaaatgactccggctgttgtgctcccgaatgccaccggactggccgctacgtttagcccgaccctgcctgccgaagccgggcgtctgttagccgcggaaaccaaggcccgcggcgcagtatgcctgctcgctccgaccatcaacatttgtcgatcccctctcggaggccgcaccttcgagagctttggtgaagatccgacgcttagtggaataatggccgccaagtatgtcagtgccctgcaagatgaaggcatctcggccgcgattaaacacttcgtggcgaacgatcaggaacacgaacgcatgggccaggatagcattatcgctccgcgcgccctgcgcgaaatttatctccgtccgtttcatatagtacaggcgctggctaagccgtggagttatatgacgtcttataacaaacttaatggaacgcattgcagcgagcatgaatggttactgtcaggtttgctgcgcaccgagtggggcttcgatggattagtgatgagcgattggatgggcacctatagcgtggcagaggccattaatgcgggtttagatctggaaatgccgggccagccgcgctggcgccaattatctctggtccgtcagctgatgaatgcccacaaaatcagtcctgttacaatcgatgaacgtgtgcgcaccattttgaaatgggtgcaaaacctggtggtgctgaatccggacacggtttatggtcgggatgactcgattgaatggacccgcaccgaagaccaggcggccgacgcagcattaatccgtcgtattggcaacgaagcaatcgtgatgttaaaaaatgagagtgcccgccttcgcccagcctggtgcgtgaccccttggcaaggtcttgttgataataagccggaccaggtggatctgcgctacgccctgggatgcaaaggcgctaaattcctaccggtctttggagaagaattcaccagcatggatggtacgacccgcggctttgacatgctgcactatgctattgtagatggcaaacaggcctctcagccagccgtgtcagaagtctggaccaactcagatattatgctggcggatttcagccatccggatctgggtgatgattattttaccgagattcgtgcgttatttacggccccaatcactggtgaatggcagtttgagatcagcgtaacgggacaggcctgggtttatattgatgaccgtctgcttgcggacctgtccaaagaacagaaacgaacatcgtcattctttggtaacggcggcaacggcacggtgatcacatttagcgtgaccaaagggaaagtgtacaagtttcgtctgttgcacgattcacgtaaacctcctctcgccccaggccaagacagtcagccactgcaactcattggtatgaaattgggctctttcccggccgttaacgaagatcagaccattgatgaggccgtggaacttgcaaaagaaagcgatattgccttgttaatggttgggttagaccaggattgggaatcagaatcgtatgatcgccctgatttatcgctgccgttacgtatgaacgacttgatccgccgtgtagcgactgaagctccggatacaaaaaaggtagttatattacaggcaggcagtgcggtgagcatgccgtggttggaacacgtggatgcagtcctttggccgtggtacggaggtaatgaagcgggtaacgcgattgcggatgtcgtatatggtactgttaatccgagcggacggctgccgatcactttaccgaaacgcgaactagacatcgccgcgaatttgaatttcaagtcagcacgtactaaaacctattatgaggaaggcatatgggttggctaccgtcacttcaacgcccgcggcattgagcctctgtatccgttcgggcacggtctgtcatacacgacctttgattacagcgatctgacggttggccccagtgcctccagttcgccggatagctggcgtatttcggtgtcagcgcgcgtgacaaataccggcacagtaccgggtgcgcattcggtgcacttttatacctcaccaccgccgccgacaatgacctcgctcacacaccctgcggtgacgcttcaggcctttgccaaaactgctgttctgcgcccgggtcagtccgaacgcgttacagtggaaatggacaaatttgcgatttcccattgggacgaattaacgtcgacctggcaggccgaaccaggtcagtggcatgtgaaaatcggtagggatgcgcagacaatgtgcatcgaggcgccctttaacgtggctcctggcttcaaatggcatggtttgtga

SEQ ID NO: 580 - DNA, 1431 bp, Artificial Sequence
  6xHis UPI0001A5B234
atgcaccaccaccaccatcacgaaaatttgtactttcagggcagcatgtttgataaaaactttttatggggcaccgccagttctagttaccagatcgaaggtgcgttcacagaagacggcaaaggcttaagtatttgggatacctttagtaataaacccgggaacattgcgcacgacgaaaacggcaacaaagcttgtgaccactatcatcgctaccgcgaggatatatctttaatgaaaaatctgggcatccaagcgtatcgtttttccatcagttggtcccgtatttttcccgatgggatcgtgaaggatagtgatggcaacattcgttacaacaaggcaggcctggatttctatgataacatcgtgaatttctgcctagaaaataacatcaaaccgttcatcacgatctatcactgggatctaccacaagccctcgaagataaaggtggctggctgaatcgcgaaaccgcatttgtcttcgcggactatgcagaatttatttgcaagcacttcagtgatcgcgtcaccaatattgccacgattaatgaaccgcaaatcatctcgggcttaggttatatgctcggcctgcatgcaccgggtaagaaactggacacagtgagcgtcctaagcgtgattcatcatctggccttagctcacggtcttgcggttactaaaatgcgagccgtggccaaacagccggtcaaaatcggttttagcagcaccggcggcctgtgctaccctagcaaggagtgcgatgaagatatcgatgcggcccgtgccgaatgctttaacatagtaaaaggtaacatgacctttaaccacaccattttttgtgatatgacgtgcttaggccgttacccggatattgcaggaactgaactgcatctcgaacctggattagagaagataggtcattacgaagaactgccgttcgtcaaaaagggcgatattgagctgatccaccaaccgatcgactatctgggtattaacgtctataacggtcacgaaattaacgcggcgggctatattaataaaaaacctggtagcccgcggaccgctctgggttggccggtaacgccgggtgttatgaattatggcatccgctacctgtacgagcgatacaatcttccgatctacattttcgaggatggcctggcctgtaatgatattatttccctggacgggaaagttcatgactctaacaggatcgattttctgacccgctatctgacagatctggaaaaagcctataaagccggggtgccaattttgggctatttccattggtcgtttaccgacaactttgaatggcatagcggttatgatccacgctttggcttggtatttgtggattatgagacccagcagcgtattccgaaagacagcgcgtattggtactccgatctgattaaaaagagcagcaactga

SEQ ID NO: 581 - DNA, 2523 bp, Artificial Sequence
  6xHis UPI000BC64A75
atgcaccaccaccatcaccacgagaacctttatttccagggaagcatggatattggcaagattgtgagcaagttaaccttggaggagaaagtgtcactactggcgggcaaggattggtggtctaccgtgggcatcccagaaaaaggagtaccgtccattaaaacaactgatggtcctaacggtgcgcgaggtggtaccttctcggtcaaatccgcgtgcctgccaacaggcgtgtgcctgggagccacctttaatattgatttgctggaacagatagggaaagtcctggcggaagagacgcgtacgaaaaatgcccgtatcctgctgggccccaccgttaacatccatcgcacggtgctcgccgggcgcaattttgagtgttatagcgaggatccctttctgtcaggcaaactggcggcagcgtatgtgcgaggcttgcaaggtgagaaaatcgcggccaccatcaagcatttcgtggctaatgatcaagaaaccgaacgcatgagcattagcagcgaaatcacggaacgcgccctgcgtgaaatctacctgatgccgttttatatagcactgaaggagtccgatccttggtgcctgatgactagttacaataaagtcaatggtcagtatgccagcgagaacgcgcatactctgcatcacatattaaggggcgaatgggcgtacgatggcctggttatctccgactggtttggaacctactccactgaggacgcggtcaatgcgggactggatcttgaaatgccgggtcctggtctgtggcgccgtgaaaaagtgctgaaggcagttcagcagggccgcatcaaagaggagactatcgaccatagcgtacgccgcttactgcaggttatggaaaagaccggctggtttaaggacgcgtttgacgtttttagcacgcctgaacgtgcaattgatgtcccggaacaccatgaaattctgcgtaatgcagccgcggaaggtatggtactgttgaaaaacaacaactccattcttccgctggatatcagcaaaataaaaagcattgcggtgataggcctgtctgctaaaaagcccatttacctcgggggcggctcttcgagtgtgcgcccgcactatgtgattagcccgcttgaggcgattcaggaaattgcagccccatataacgtggaagtcaactacgcccagggtgcgtatacccattctcttattccgtatctagccgaagaccgcctgatcaccctcgatggtaaagaagaaggcatgatgatcgagttctttgacaacgacgatctgcagggtgaggtcaaggccactaagttctaccctaactcacgctacaaatgtaatgctatcatgccggcaggtattgatgctaatcactatagctgccgcggtacttgtcgctttgaagcgccggtggatggagaatacaccattggtctggtcgcggctggacccgccaacatgtttgtgaacggcaaaaaaatcttgagcatgaataaaatgattatcccgggagcatatttcaccacacgcgagaatgaagaaacagttaagattaccctgaaagcaaacatgatttacactatcacggtcgaatacagagttacctatcgtcgtcccgcagtaggcttccagattggcgttttagaaccgattgatgatcttattgtggaaaacgcggcaaaagtagccgagaaagccgatattgccctcgtgtttaccggcctcaacttcgaatgggaatctgagggctttgaccgtagctccatggatctgagcggacgtcagaacgagttaatccgtgcgtgcgcggcggccaactcaaaaaccatcgtggtaaacaacagcggtagcccgatcaccatgccgtggctcgacgaggtccagggttttctgcaagcttggtttcctgggcaagaatgtggccacgccatagcggatatccttttcggacagcgtgatccgggtggtcgccttcccactacctttcccaagcgccttgaagatacccccgcatttattaattttccgggcgaaaatggcaaagtagtgtacggcgaaggtctgtacgtgggctatcgctactatgataaaactagcaccgatgtacttttcccgtttggttttggccttagctacaccacatacaagtactccgacgccaccgtgcagcagcaggccgagactgccgataatgtgtcagttaatgtaacggttaacgtgaccaacaccggctcccgtacaggtcaggaagtcgtgcaagtgtatgtacacgacaagttggccaaactgtcgcgaccggataaagaactgaaaggcttcgccaagattcgtctgaacccaggtgaaactaaacaggttagtatcaccctagatcgcatggctttcggttactacgatgacaagacagagcactttgtcgcggaggaaggagatttcgatataatcatcgcgcgctcctcgaaagacatcgttcaaaacctgcatttcacgctcaagaagaccatgcagtgggtttattga

SEQ ID NO: 582 - DNA, 1335 bp, Artificial Sequence
  6xHis UPI000CAA854E
atgcatcaccatcaccatcacgagaacctgtacttccagggtagtatggatccgttctactggggcctggccaccagcgcgttccaaatggaaggattcgtacagaacgatatgacccaatgggaagccttagggggctttcgtcaggatggtaaaaaccctctgtatcagaatggtgcggcccattggcagtattggcaagaggattatcgattactggcttcaattggagttaacgcgtatcgctttagcatggaatgggcgagaattgagcctaaacgtggtcactacgatcagaaaagcctggaccattatgaacgcatgctcgacaccctgctcaaaatgggcatagagccgtttctgacccttcaccacttcacccatcccgtgtggtttcatgcgcaaaccccgtggacatcagaagccgcgcaggatgtgttttgttccttcgccgaaatgctgatcaaacgtttcgcctcaaagattaactactggatcacgttcaacgaaccgctggtgtgggtgttggcagcctatggcgacgcaaaatttccgccgggaaagaataacgtgaccgaaatgatccacgcattcttgaacattctgaaaacccacgcttgcgtgtatgatcgcattaagtcagcccgtccgctggcgcgtgtaggcttggctaaacactttattgtgtttgctccgggtcgtaagtggttcgcggctgatcgctccctggcggacctcctgcatggattcttcaataagatgaccctggacgctttcaaactgaatcggctgaagttccgctttccgttcctgtttaacttcgatgaacccgttgtcctgaatgataagattgacttctggggcgtgaattattactaccgcatgtacagcgcctttaaattgaactttcgtcgcccgatccattttttcttcaaggacgcatcaggccacggtctgaccgatatgggctgggagatttatccgaaaggcttaggtcagatccttaaagccgtcgctcgctcaggtaaagacatcttcattaccgaaaatggtattgcgaccactgatgaggcactccgcatgcgctttatggatgagcacattcgccaaattctgagcgcaagacaaaacgggttgccggtacgcggttatttttactggacctttctcgacaactatgaatggctggaaggtaaatctaaacgctttggcctggtgcatgttgactacgcaaacgatttcgcccgtaaagtgaaaccgtcagcagaacactatgcccgcatgattgcaggcgattgcgcaggcaaagctgcgccggcgaaaaataaaatttga

SEQ ID NO: 583 - DNA, 2613 bp, Artificial Sequence
  6xHis UPI000D24EC2C
atgcaccatcatcatcatcacgagaatctgtacttccaaggctctatggaaatctcgaccttattagattccctgaccctggaagagaaatgtattctgctgtcaggtcaaaatatgtgggaaactgcaagcattccgcgcctgggtattccctccctgaaaatgacggatggtccggcgggtgttcgtggtagtcgctgggttgatggcacgccgacgacgcagattccgtgtggcataagcctggcggcaacctttaatccggagctgatggaacgtatcggtcagttactgggattcgaggcgaaatgcaaaaatgcccaagttctcctagcgcccacaatgaatatgtcccgcagcccgtttggaggtcgcaattttgaaaattttggtgaagatccatatctgaccggccgcatggccaccggattcattaaaggtgtgcaagaacagggggttgcagcgtgtatgaaacattttgtgctgaacgagcaagaaactcgccgctttaacatggatgaacacattgacgaacgtacccttcgtgaagtttacctgaaaccgtttatgatggctttgcgtgcggacccgtggacggccatgacgagctacccaaaaattaatggggaacatgcagatactagtcagtttctagttaaagaaattctccgtaaagagtggcgctatgaaggtcttgtgatgtcagattggggcggcctgaatgacaccgtgaagagtatattggcctccaccgatttggagatgccgggccctgcgattcgttacggcaatgcactgatgaaagcggtggcccgcggtgacgttagcgaaaaccgcgatataaacccggcggtggaacgtctgtttcatttgctcgcgaagaccggccaactggcgggtggtcaacctcgtagcggcaccagtgatgtgacgccggaagcgccggagggcgaaagcgacaacccagaagcccgtcgtctggtgcgcgaagcggcatcacagggaattgtgctcttgaaaaattccggcatcctccccttgcagtcgggccagatccgtaaactggccgtaattgggcctaatacgaaatatccaaccacaggcggctcgggttcagcggccgtcaacccatattatattagtactcctctgaaggcaatctcacaactcgcacgtcagcgcaattctcaggttgagattctgtacgaacgcggtatctttacccataaacagccgcctctcgtgggcgattgcttaactgtacacgaaaccggcctgccaggcctccaggtcgatttctatgattcagacaacttcgagggtgacattgtcgccacctctcactggaatgattcgttcctctttttcatgagtgatggcgatgttccgaaatcactgcagggcaaaacgtatagttataaggcacacggtatcctcaagcctaccgtgagcggggactatgatctgtcctttagttcaacgggcaaagcgaaactgttcatcgacgacaaaattctgattgataataccgactggacggagattggcgaaaactttatgaatgcgggcagcattgaaaagctggcgagtatgtaccttgaaggcggtaaaatgtacaaactgcgtgttgataacgtggcgacccctccgccgatcagaccactggacaacaccttgtttggcactttatcgggtattcgcgtgggtatgtttctccagcatgatgaagacgcaatgctggaccgagccgtaagcgcagcgaaagatgccgatgtcgtggtccttgtagtcgggcataataatgacacagaacgtgaaggctcggatcgtaccagccttagcctgccgaaaaaaaccgatcaactggttgaaaaggtttgtgccgtaaattcgaaagtcatcgtggtgacccaatccgcatgtgccattgccatgccgtgggtcaaattaccggcagccattgtgcatgcctggtatcagggccaggaatgtggtaatgcgctggcggatgtcctgtttggcgtggcaaatccttcgggaaaactaccgatcacctttccgaaacgtattgaggatcacggttcccacaaatggtttcctggggattttgagaatgatcatacgacctatggggagggtgtcctggttggctatcgttggctggacgcgcacggcctggaacctttatggccattcggatacggtctgtcctataccagttttaaaatcgaaaatgcgtccgtggaaggtcaagtggcccgtatgggctgggataccacagcagttgtttgcttccagattagtaatactggcacagtggcggggtcggaagtggtgcagttatatgtctccccttctaagaaaattgaagaaatgggtcgccccgcggccccgagatcattagccgcatttagcaaagtgtttctgtcgtgtggggaaaccaaagaattaaaaattcgcctgagcagcgatgcgtttacttggtttgacgttgagggtaaaggtggtctggattccgggggtaaatggcgattagatgaagggacctacacctgcttcattggcgccagctcacgcaatctggcggccacggtggacatagtagtgcgttga

SEQ ID NO: 584 - DNA, 2721 bp, Artificial Sequence
  6xHis UPI000D77A0B7
atgcaccaccatcatcatcacgaaaatctgtatttccagggatctatgagctatgtgcatttactttcccagctgaccctggaggaaaagatccaactgactgcaggtcaagatttctggcgcacatttagcctaccgcgtcatagcattccgtacgcaaagctaaccgatggtccaaacggagcccgtggcggcggcgattttcagaatagcgttcccgctgcattgttcccctctccgtcatgtctttcatcgacgttcgacgtcagtttggcacgggctatgggcgaaggaattgcgctggactctctcagcaaacgttgccatattagcttggctccgaccatcaatatcactcgtgatcagcgttatggccgggcttttgaaaactatggtgaagatccgttactctccggacacataggtgcgcattggactctgggttgtcagtccgtgggtgttggtgccacgccgaaacacttcgtgctcaacgaggcggaagaagatcgccgctttagtgattcccaggtgtcgcaggaggccatgcgcgaagtctatcttgagccgttccgtactttatttcatgaagtcgcaaagggccacaaagatggctcagacggcgagaagagtaaagtttttggcggacagccggcctgtattatgaccgcctacaaccgcgttaatggcacctcggcgtcagagaataaattcaccttgattgatgtactgcgcaaggagtggggatggaaaggcttggttatgtcagattggtttgccttgcatagtcacgcgttactcacgtgcgatcttgaaatgccgggcccgacgatctaccggtcaccggaggcgattaaagaattaatcaaaaaaggggatttgtctgaagccgatgtggatgcccgcgcgacgaaggttctggaactgttagaaaaaattgcccctttgggtttcgttgacagcccggacgaggaacatgaggaaagcatcgtggacgctggtcgcgaagagaaaatccgcacaatcgcgacggaaggcgccgtgctgcttcgcaatgaatctgaaacactgcctcttgattttgtgaatcgcaagacgcgtaagatcgcgctgattggcaagccttggaaagaaccagtccagagtgggggtggcagtgcgaatcttactccgcagctggcgaaaccggcgttcgagtcactgcatgaggcattagatgccctgcctaatggagccggtaaggatgtcgaactgagctaccacttcggctgtgaaattcatcgttttccggttgaaccgaaaggagaacagcgtattccgggtggtgttaaagcagagtggtttaaaggcccccatcccccgcagcctgaagatgaagataaagaacctgccccgctgctggaacagcatttggcagccccaacgttacgagcgatggatccgaaacctgatgttcttgaagcgaacaacttctccctgcgtgctacttttagtttagtaagccagaccgcgggccgccacaaactcggactgacttcgttaggaaacatccgcgcaattgttacccgtcaaaacggtgaagaagcactggattggaaatatgaaggcgcgcgagacgtgttcagctattttttggatgaataccgcaccgcacaggatggccgcgtgaagatggaagccggggaaaaggtgactgtgacccttctctatagcccggcgcagattgaaggggatctggcacaacaaaaatcgtctgcgttccgttgtgggtttgatgaagaaatcgacgacaagggagaaatcgaggcagccgccagccttgccagtagcgctgacgtagcgattgtgatgacagccgtgggcaaagattgggaaagcgagggttatgatcgtccgcatctccgtctgccgcgcctgcagagcgaactggtggaacgcgtggctaaagcgcagaaagataccattctggtaaacgtgagcggttcagccgtcgaattgccattcgctaaccagctcaaagcgctggtgcagacctggtacggtggccaggaagcaggtgcagcgatagtggatattctgttagggaaggggcgggccccagctagcggtcgcttgtgcactacatggccaattagcgtccaagatcaaccgggcggcagcagcctggagttgtttcctggtaaagatttgaccggtcgtggccatccagacgtgaaatatgctgaagggcgcctggtagggtacaagtggtatgaagccaaaggcattcgtccggcccactatttcggtagtggtattggcggttacaccacttttgagcggaaactgctccaagtggaagccgccattatgaaacaggagaaaaaggtcgaggtggcggtggaagtcaccaataccggcaagcgcagtggcaaagatgtggttcaagtttatattgcgccgccctctgatttgatacagggtgacgttccgcataaagaactggccgcgtttagcagcgtgcacctctctgccggagagaaaaccacattacgtcttagcgtaggcgagcgtgcattctcgcactggcgtcaagacgaacagggcggtagcggtcattgggaagttgtcccaggggaatatcacgtaatcctggccagcagtgcagatcctaaagacgagattgcccgcgaacctgtcaccgtggagaaaggctggacctggtccggcctcggtatcgtgtga

SEQ ID NO: 585 - DNA, 1770 bp, Artificial Sequence
  6xHis UPI0002DAAFCC
atgcaccatcatcatcatcatgagaatttatattttcaaggctcgatggttaaagtcgacctgactgcgagcccgtaccacctcaatgataaccaaattgcgtgggtggaggagaccttgggtaccctgaccgatgaagaaaaaattggccaactgttcttcaacctgttctctttggaaggcggcaaaaaattcttcgacgcggatctgacaaacaaagatatcctggaacgctaccatattggtggtgcccgctatgaaggagggaacaaagaagaagtgcagaaccttctcaacgatttacagcgccatacgaaggtaccggttttagtcgcagcgaactgcgatagcggcggtaatggcgcctgtaaagacggcacttatatcgcaagtgcggcgcaatgcgaagcagcccaggataccaaagtgagttataacgcaggcttagtgagcgcccgcgaatcaagcgccctgggtgtgcacattaacttctacccctgcgtagacattctgaaaaactggcgcaacactattgtaaacactcgggcgtacggcacggatgccgaaaccgtgattaagtacagcagcgcatttattgatggcttcaacgcggaacgggatatgattacctgcattaaacattttccgggtgatggtaccgaagaacgcgatcagcatttagtacttggggtcaacgagctgagcactgatgagtgggatgatagctttcgcaaagtctatcagcatcacattgatcgtggcgttcaaatgatcatggcggggcatattgcgcaaccggcgtatagcaagaaactgaacccttcactggaagacaaggacattcttccggcaactttatcttcggaactcatcaccgatctgctcaaggacgatatgaaatttaacggcctcgttgttacggacgccagccacatgttaggtatgaccgccagcatgcgccgagaagactatgtgcctctggcgattgcggcgggttgcgacatgttcctgttctttaacgacctggaggaagattatcagtttatgttaaacggttacaagaacggggttattacagaggaacgactgaatgacgctgtgcgccgtatccttggtttaaaatcgcagctgaacctgcacatgaaacaagaagacggtagcattattcaaccccaggaagccctggacattattggttgcacggaacatctggaaatgcgtgcggaagccgcggacctgggtattaccctggtcaaaaacacccttaaccagctcccgattcgccccgaaacccataaaaatattatgctctatgtgatagagggtgaaaaggacggcatttacaaaagcgccaacaacgtaaccgacgatattataaaagaactggaatcgcgtggctttaatgtgaccttaaacgatggctcgacacgtattaagggtaaaactctggagtatcgtgaaaaagtagatgcggccctggtgtttgcgaatatcatcggctatgccgctgaaaacaactaccgcattaaatggggtactgcaatgagtaatgaaatcccgtggtacgtccatgaagtaccgacggtgttcatttcaaccaacttcacgacccatctgcatgatgcgacgatggtgaaggcctatatcaatgcctaccactcaaaccgcgaaaatatcaagcagaccattgataaaatcatgggtgaatccgaatttaaaggacagtataacgatttggtgtggaccgaaaaatggcaagctaaattatga

SEQ ID NO: 586 - DNA, 2034 bp, Artificial Sequence
  6xHis UPI000F0C6B8E
atgcaccaccaccaccaccatgagaatctgtatttccaggggtcgatgcagctgacatcgacgcttctggatttcactaaagttgccagcacccttagcctgagtgtcgcgaattataaaccgattccagtgttacagacgaacgacagctcaagccatggtcgtgtgggtgcagttagcaaccacaaatcgggtaccgaagaccatagtgcggcgagctggggcatgcctagcattctgcatatcccggaaagctccagcaaaggaaacaatgggcgcgtggcaagcagccacaaaggttcaagcggcgaaaccgtaggtaccgggtgcaacgtgctggatgaatacagccctaaagattccctgaatgtggaatttccgccttacaaccagacccgcgcaaacatcatgcgctatcgcaaacagatcggcgtgaacggtggttcatggttcgtactcgaaaattggatggcaccgtcaatgtttgattgcgccgcggatggaaaagtttctgaaatggattttctgaacggctatggcggcagtgaaaaagggatgaaaagtgcgcaggcccgcctagaagaacattgggatacgtggatccaggccaaggacttcgttgagatgaagtctcttggtctgaatacgtttcggctgccgattggttattggcacctccctggctctaactttacgaaaaactcggacttcgaaccctacggcaaagtgtatgtcaacgcttggaaatatatcaagcgcgcgattaagtacgccgacgataatgatataggtgtcctgattgatatgcatggtgcgtatggcagccagaatggtcaaccccacagcggggtgaataacgggaaagcagatttctttaacgacttcaacgagaacaaaatgaccaaactgctggtatggcttgttcaagagctggaggacgtaagcaatgtcattggcatcgaactgttgaatgaaccgcacaataccaaacgcttgtggaaatggtactcaaggacgatggacgcaatgcgtaaagcgcagactaaatcccgagacatgccgctgtattttcatgacgccttttcgccaagtcaaggcgccgaattcgtttctaaacgcgatgacttcgtcgtgcaggatacgcacagttacttcgtgtatactcaacaggatcgtgatatgagcgcctcgaaacatactagccacattgagggccaggtacagaaatcgatgagcgatctggcggacaaggcacgcggaaacatggttgtcggcgagtggagctgcgcgctgaacccgaacagtctgcgtaacagcaataataaacgtgccgcaacctccgattattgccgcgcccagactagcacttatcttaacgcgaccgcgggtgttatgttctggtcatggaatatggagcactgtagtagcaatgccggctggtgctttaaatcggtactgccccgctacatgaaaaattcatacaacgcgtggggcctagatgggcagattaccaataaaaccattaacaccgtaaccgaaaaaatcatctctcaggaactcccgagcaagtatcgcagtgataccaagggtaaatcactcagcgtttgcaacaaagatggcggtgcaaaccagtctagtggctctactaaaaacagcggccgcaacgcggccgttaaaaaaagtcagtcacatgcctcaaaacacgacggctctagcaaaaagaataaacacacccttcagcacagatctgaatctcacgagggagcacttaaccgtcgagggtttcatcaccacgtgctcagtgatattctgggctacggcgatggattcaataccgcgaaattcctggccggcatgatgagcctttctcgtctcggcttcgaacaacaatacctgagcgacacaggcgaatactataaaaaacataaaattatcgacatcggtaagcatgatagtaaatcttataaaagccactttaaaaagggcttaaacgctatggagagtaagattattaagattgcggaaaaagcgtga

SEQ ID NO: 587 - DNA, 2544 bp, Artificial Sequence
  6xHis UPI000FBA70E2
atgcatcatcatcatcaccacgaaaacctgtattttcagggctcaatggttgcgcttatttcgcctctggtaaatggccacaccgcgaccaaaaaaaatattgcgctggtcgtggaggaagccctcagtgaactgccgatacacgagcaggttcagctgctcggcgggaaagacttttggcatcttaacgatctgccacaccgtaacattccgagcgtgcgtctgagcgacggtccgaatggctgccgcggtaccaacttcttcaatggtcaaccgagtagctgtctgccatgtgcgaccggcctcgcagcctcgttcgacctcgattacattcgcgatattggtgttcaattgggccaggaatgccgtgccaaagcggtccacacgggcaatgaacaggagtttgaacgcatgaaagctgattccatcatttcggagcgtgctttacgcgaaatttacctggagccgtttcgtatggcggtcaaagaagcccaaccgcgttgtttcatgacgggctacaatcgtctgaacgggactcattgctctgaaaatgcgattctgctgaacgacattctgcgcaaagaatggggctatgatggcctggtgatgtcggattggacgggcactgtaagtagcgcggggacaatcaaggcgggcttagacctggaaatgccgggtccccctgtgttccgtgggagcagcactctgcgcgaattacagtgcggcaagttaacacccgaagacatttcttctcgtgcccgcgaagtcttaaaacttgtcgcgtttgcacagcagtcgggtattcctttcggagcagaagaaggtagcattgacacagccgaaagccgtcgtttactgcgccgcgcagcggccgaagcggtggtgttactaaaaaacgagaatggtattttaccactgcgccaaccgaaaaaaattgcggttatcggccataatgcccgggtggccgtcgtgagcggcggaggctctgcccaattatcgccgacgtttagcactacccctctggcggccattaccaaagcagccgagtccgcgggggccgaagtaaaatttgcaatcgggtgcttatcctaccattacttaccggtggcgacccccctgttaagctatccgcacgatggctcgcgcccagacgtggttgcaagcctgagtttttggttaagcgaacctcacccggaattcaaatcaccgaaagataccgcattacgcctcaccgatgaaccggatcataacgttctgtgtaatacggcgttcgcctttattacagatggagttcccaaaccgattgttgagggttttccgtacatggtctactccagccacttcactcctgatcaaagctgtgattgggaattttcattagcaagtgtgggacacgcgctgctgttcatcgatggtcagttagtggcggataacaccgaatgggaacagggcgatacctttttcggcatgggaagccgcgaacgaaaagggattgtgaaaaacatgcgtcaggggcgctccgtgaaagtagaaatccgcagctggccccgggacgtgcaacgtgtttttccggtaaaaattgctggtgccgttcgtttaggcgccgttcctatggttgatgaagcagtcgcaattgcacaggccgcgaaactggctcaggaatcggataccgcggtggtggttgtgggccttaatgaagattttgaatgcgagggtcatgatcgcaccactatcaatctgcctggagctatgaacgaactggttgcttcggttctggcagtgaagcctgatgccatcattgtcacccagagtggtatgcctgttgccatgccctgggcagatcaggcagcctccctgctccacgcgttttacggcggcaacgacctggggactggtattgcagacgtcttgttcggcaaaattaacccaagctcccgtctgccagttagctttccgcgtgccctgagcgatatgccttccggcaccatgtttggtgcagcgtctcctagcccattacgtgctgtttacactgaggtacgcgcggcactggctgcggtgttggatgatatagaactgatcgtctcgcaggacatctacgtgggttatcgttacttcgaccattcaggcattcgtcctttgttcccgttcggccacggtctgtcgtacacgaccttcaaatacagcgatttgatcctcgccccgtgcgcggaggatccaactcgcttcgaaatttcttttggcctgactaattcaggtgcgcttccgggcgccgaggtgagccagatttacgtgtatgcagtagaacatgcgcatcgcccgcagaaagaacttagagcatttacgaagacccatttgcaggtaggcgaaaatgtaactgtgaatgccagcctagatcgtgatgcctttaaaacgtggcacgaggtgcgcagttgttggacggttgcgcagggtcagtacgaagtgtggatcgggcaatcagccgagcgaatcgtactcaaaggcaccctgtctattaaagaaacgttatactggagcggattgtga

SEQ ID NO: 588 - DNA, 2688 bp, Artificial Sequence
  6xHis UPI00102822B4
atgcatcatcatcaccatcacgaaaatctctattttcagggctcgatggatcgttcgttccttagcgccaacatcccggacctggtaggccgtttgacgatggaagaaaaaatcagtttgctggccggcgaagatttctggagcacggtcccgatcccgcgcctgaatatccctaaaataaaaatgtcggatgggccgaatggggctcgcggcgaatcattcttcaaaatgactcctgctgtggctgccccgaacgctacgtgcttagcggcaaccttcagtacctcactggttagatcttgtgcgcagttattagctgccgaaacgaaggcgcgtaatgcggtgtgtctgcttgcacctactatcaatattcagcggtccccgttaggcggccgtgcgtttgaatcattttcggaggatcccaccctgagtggtctgctggcagcagcctacgtcgacgggctgcaaagctccggcgtgtcagcgactatcaaacactttgtcgcgaatgatcaagaagacgatcgcatgggagccaattgcattattagtccgcgcgcgctgcgtgaaatctacttacgtccgttccaaattgcacaagcgcggtcgaaaccgtgggcgtatatgacagcgtatagcaaaatcaatggcatccattgttctgaaaatgagtggctgattcaggacctgctgcgcaaggaatggggtcatgaaggcatggtaatgtcagactggtatggtacttatagcgtttgtgagagcattaacgcgggctgtgatttagaaatgcccggcccgaccgtttggcgtggtcagcagcaggtgggccatttgatcatggcccataaaatagatcctcgcactattgatcgcaacgcccaacgcgtccttgaatgggtacagcgttgcgcccgtatgaacgaagatctcgtgtatgcacctccgaaggaggaacgcagtcgcaccgaaaacaaggaagaagatgcgaaattactgcgccgaattggagccgaaggcattgtactcctgaaaaacgaacaggatattttaccgattgaaggcaaacgcaaagtggccattattggcccaaatgctaaaagtaaaattcttacgggtggtgggagcgccctgcttcgtgcggcatgggcggttacgccatggcaagggttagaagacaacaaaccgagcgaagtggaattaacgtacagctacggctgcacaggcacaaagtatctgccggttcttgatgagcatttcacttgcatagacggcagcccggggtttaacctcagccaccataacattgtggacggtgtgcagtcagaaaaaccgcatgtggtggataaatgggattcaagcgacatgttcatgggtgattactcccccccgggtctgcaacggcctttcgtaaccgaactacgtgcgattttcacatctccgattgatggggaatatgattttggtctgaccgtgaccggccgtggctggttatatttggacgatcagcttgtagtagacaactcgtcgaaccagcagcgtggggaagctttttttgggtcgggaaccgttgaacgtgttggtaaagtacgagtgcataaagatcagaaatacatattacgggttattcacgatggtcgtaaagagatgtccgggcatggcgcgggtgatccgaacccttttcctgccagcggtctgcgcatcggagcgtttcctagcagtgatccggaagagaccatgcaacaagcagtggatctcgcgaaagagagcgacatcgcgattgttgttgtcggcttgaattctgattgggagtcagagggctacgaccgcttaaatctgtcgcttccgctgcgtcaaaacgaactggtaacgcgcatttcggcggttaatccgaatacggtcgtggttgtgcagggaggttccgcagtaagcatgccgtggaaagatgaagtaaagggcatcattcactgctggtacggtgggaatgaagcaggcaatgcgattgctgacattctctatggcagcgttaatccatcagggcgccttcctatctcgtttccggagaaagaggaggatatcgccgcctggaccggtcgccggagtcaaggcggagaaattcgatatgaagagggtatttgggtgggttatcgctggcacaacgttcgaaaaattaaaccgctgtgggcctttggatatggcctgtcttataccttctgggaatatcaggacttatctgtgactagccatgtaaaagaacgtgacctggattcagagaacaaactggaagtaggcaacgagggacgtatcggccgattagaggtaggtaccaaaaaagtgacggtggatgaatggcgcttgaaagtgtcggttaaagttaagaacattggcaagcgcaagggggaccactccgtgcacttctacttcagtccgccagagcgtaaaggcatgggtttggaacatccgcaatggacgctgcagggctttggaaaagtctatggtgtggggtcaggcaaagaggaattggtggaagtggagtttgataagtacgcaatttcccattgggatcccatccatgatgtttggcgcgtggaaaaaggcgaatggattgtccgtataggcattgatagccagaccatgtggggtaaagaaacattcgtgattgatgaagatatggaatgggtgggagtttga

SEQ ID NO: 589 - DNA, 1467 bp, Artificial Sequence
  6xHis UPI0000527506
atgcaccaccaccaccatcatgagaatctgtattttcagggttccatgcagaactccgcggcgctacaatcattagccgagcgtctagatccggagtttgtacttggcgttgccgctgcagccttccagattgaaggttcactaaaagctgacggacgcggtccctcaggttgggatgctttcgcggaaaaaccaggatctattatggatggtcatagcccggcgattgcctgtgaccattataatcgtagcggcgaagacgtagcgcttatgcgcgaactgggcatcaacagttatcgcttcagtattagctggcctcgtattcaaccggatggtcgtgggtcgttcaattcgcagggccttgacttttatgatcgccttattgaccagctgctggatgcgggcattagtccgatggccacgctgtaccattgggacacgccgctccctctggagcatggaggcggctggctgaatcgctctaccgcagaacgctttgcggaatatagcgcggccgcaggcgaaagatttggcgatcgcgttgcacaatgggtgacacttaatgaaccagtgagcgttaccctcaacggatatgcccttggagtgcacgcgccgggccataatcttctgtttaacgccctgccgagcattcatcatcagttgttagggcacggtttagccgttcaagccctgcgtgctgccggcgttactggtgcagtaggagtaaccaatctacattcgcctgtacgtccagcgacccgcaagccgggagatcgaatggttgcgcgcatcttcgatattctgatgaaccgtatttacgctgatccggtcctgttaggccgctacccaaaactgccattggtagtacgcccttggttccgcagcatgggcaaaatttcagacgccgacctgcgaactattcaccaaccgttggatttctatggcctgaactactactatccagtaaaagtggcgatggggcgtggccccgtctcggttcccgcaaacaacagtggggccctggcacaattaccgttccatgaagtaggttatccggaatacgaaactaccggttttggctggccggtcgcaccaaaacatatcggcatcctgttacgcgaaatgaaagaccgttatggcgacgcattgcctccgctgtatattaccgagtcgggtgcgtcttttccagaaccggagcacgtgacaggcccgattgcagatagtaatcggattgaatacttagcctcacatcttggacatgcgttggccgcaaccagccctggtggtctggcggaagatgtaaaacttctgggttattacgtctggaccctgcttgataactttgaatgggcagccggctattcccagcgctttggcttaattcatgtggatttcgatactctggaacgcaccccgaaagaaagtttctactggctgcaagcattaagtcgagcccgtaaagcatga

SEQ ID NO: 590 - DNA, 1422 bp, Artificial Sequence
  6xHis UPI000157388C
atgcaccatcatcatcaccacgaaaacttgtattttcagggctcgaatattaccaactccacgattcagtcacagtataatagcaacaatttccagtaccagggcgttgcgattggtgggtggctggtgctagaaccctatatcacaccgtcactttttctggcatttaaccagaccgcaaacacgacggaaaaagacattccggttgatgaataccattactgcaaaaagctgggctacgaagaagccgagaaacgcttgacccagcactgggacaccttctacacagaaaatgactttgcggatatcaaaaacgcgggattgaacatggtgcgtattccgattgggtattgggcgttccagaaattagacggagatccgtacgtgagcggtgctcaggattacctggataaagctctggagtgggccaagaacaatgacctgaaagtgtggattgatttgcacggcgtgccggggagtcagaacggttttgataatagcggctttcgcgatattggctacccgggctggttcaatagcaccgaaaacgtgaacctgacaaagcaggtcttacaccagatctaccataaatatggcacaggcgagaatgcgatcaattaccgtgatacgatcctgggcatcgaagtggttaacgaaccgtttacccccaaactgagcatgagccgccttcagtctttctacatcgacacctacattgatagccgcaaaacgcagaccttaaacaacaccattgttattcatgacggctttgaggggatcggttactggaatgatttccttgcggggggcaaagtgtactctaattcaagctacctgaacaccgtagccagtgccgaagtgtttaatgtgctgattgatcaccaccactatgaggttttcgcgagtagcgtggcctctaacattacgacccatctcagcaacattcgagggtacagccagtctatcaaggatgagctgaagtaccatccagcagttgttggcgaatggtcagcagcgttgaccgattgcaccccgtggttgaatggggtgggtctgggtgcccgctatgccggcgaagcaccttacgataacactactaaagttggcaaatgcgacaacatcaataacttcgacaaatggaccaaacagcagaagaaaaatacccgtaagtttattgagattcagctggatcaatactcacgttactccaacggttggattttctggtgttggaaaaccgagacaaccatcgaatgggatttcaaaaaactggtggaactggatctgatgccgcagccgttgaacaattttacttacatagttaacggtaccgacaccgatccagattccggcgcaagtttggcacgtctgtcattatttatcccagttgcgagtgtcctgatgtttgtagcattcttctga

SEQ ID NO: 591 - DNA, 1428 bp, Artificial Sequence
  6xHis UPI0001712E02
atgcaccatcatcaccaccacgaaaacctgtattttcagggctccatgaatatgcctccgaatgcggcggcgaatcccatcgcgcctccggcgggttcggcaatgaatcgtcgcgatttcgtttggggtgtggccaccgccagctatcagatcgaaggggcgattgatgcggatggccgtctaccaagcatttgggacacattctgtgccaccccgggaaaagtgctgcgtggcgagacaggagcactggcgtgtgatcattaccaccgttgggaatcggatgtagatctgattgcggacctgggggtagatgcctatcgcctgtcgattgcatggccccgagttatgcatgccgacggtcgcccgaaccaagctggcctggacttttacaaacgcttacttgaccgtctggcagaacggggcgtgaaatgcatggcaaccctgtatcattgggatctgcctcagcatttagaagatcgcggtggctggctgaaccgggatacagcctaccgtttcgccgactatgctgacttggtatcgcgtgaactgtctggccgtgttaatgcatacgcgacccttaacgaaccgtggtgtagcgcgtttctggggtatggtaatggccatcacgcaccgggtttagcgaatggccggtacgcaacccaggcaatgcatcatcttctgctagcgcacgggttggcattagcgccgctggctgcgaatgacccacaggctcagcgtggcatcgtagcaaacgttggccgcggttcaactctgggtgattcagccgcagaccatgaagcagcacgtctttttgaacttcagcataacgattgggttcttcagccgttgttaaaaggcagctacccgcaggacctgttcaaactttggccgggtactgaacccctggtactggacggagatctagctacaatttccggcccgcttgattttctcggcattaactactattttcgctcgacagtccagagcgatggcgctcacggttacacggaagtgactaggccggatgttgagcgcactcaaatgggttgggaagtttatccgcagggtctggaagatttactgcgcggctttcatacgagctatccgaacctgccgccaatttatattaccgaaaacgggatgtccagcgatgatcgtgtggtgaatggcccaaacggtccgcgtgtcgatgatgcccaacgccagagctttcttcaacgccatttcgcagctattagccgtgctatcgatgcgggcgtggatgttcgtggttattatatctggtcattaatggataactttgaatgggcgtttggttacgaacgccgtttcgggctggtccatgtagactatgccacacaacaacgcacactcaaggattctgcgctgttgttccagcattacctggcacagcgcaaaggttga

SEQ ID NO: 592 - DNA, 1152 bp, Artificial Sequence
  6xHis UPI000166883C
atgcatcatcatcatcaccacgaaaacctctatttccagggtagcatggaaacgacccgcacgaaattacgtggtgtgaaccttggtagctggctccttcttgaaaaatggatggttccgagtctctttgaagggctggaagccaccgatgaaaccacttggtgtgccgaattaggtccggcagctactgaacgtttacgccggcactggaacacctttgttacccgggaggattttgcgtggattgcagcccgtggtttaaatgcagttcgtattccgatcggccactggatttttggaccggattacccgtaccatccgaaatatggcgcgcatcgacacccatttgtcaccggtgggattgaagttctggaccgtgcattagattgggcgcaagaatttggcctgcgtgtgattattgatttgcatgcggcgccaggctgccagaacgggtttgataatgggggcattaaggacgttgtggagtggcataccaaaaaggagtacttagaacattcgctggcggtacttgaacgcttagcggaacgttaccgtgcccatccagcgctgcatggtattgaactgctgaatgaaccgcgttgggatgtaccgaccgattacctgaaatcgtattatttggaagcctacgcgcgaatccgcaaacattgtgccccggaaacagttgcggttgtgtttcacgacggttttcgatcgtttcgcgaatatctgggctttatgcaggcccccgcctttagaaatgtagtgttcgactaccaccgttaccagtgtttcgagcgttgcgatattgacatggacattcacggccacattcgtaaagcggcggttgattggcgcgaagaagcggatgcaatcaacgccgaacttggtttacctgcggtttgtggtgaatggagtctcggtctggacttgaaagtggtgagcctttgggcggaaggtccttttaatcacgccctagagcacatggacgattttcaacaggatgttgcgtcacgcgcttacggtgatagtcagctgatgaccttcgaacgtctggccggttggttcttttggagttacaaaaccgaaactacccccgcttggtgcctccgcgcgtgtgttgaacgtggctggctgccttcacggtttggctga

SEQ ID NO: 593 - DNA, 1296 bp, Artificial Sequence
  6xHis UPI00018494AB
atgcatcatcaccaccaccatgagaacctctattttcagggcagcatgaagagctttccggcaggctttatgtggggtgtagcaactgcgggccatcaaattgaaggtggcaactacttctcggattggtataagtgggaaatggagggcaaagttaagaatggcgataccagtgaaaccgcctgtgactcatggaatcaactcgatcgcgacttggaaatcttgaagaaactgagtgtgaaagcgtaccgctactcgattgaatgggcacgcgttgaaccaaaactcaataagttcgacgaagaaagcctgaacaaataccgcgattttacgatcaagctggtagaagccaacattaaaccgattattacgctgcaccatttcgtgaacccgcagtggtttgccgaaattggtggatgggaatcgcgcgagaatttacgctatttcctgcgctatgtaaacaaggtcgtagacacgttgggggagtttgttccgttttggattacaatcaatgaaccgaacgtctatgcgattaagagctacctgatgggagagtggccgcccgaagttaaagaccgtggtcgcgcctttcaggtcctgaaaaatcttctgatcgcacatacggaagcctacgacatcattaaaagccgttacccgagcgcgatggtgtctgtggcatacaattttgtgccgttttacccgtatcgcaaatggcacccgttagacattatcaccgcgttcacgctgaataaaacctacaattacgccttcctggatagcatcaagcacggcaaattctacaaaccaatcggctcaggcgagaagaacaaaaagctgaaagataagttggacttcattggcgtgaattattacacgcgctacttcgttaaatacagcaaaccggaacctgagctggtggacaccggcaacaaaaaaaccgatatgggctacgaattctacccggaggggctgcgtacgatcattatgaaatgccataaggattactccctgccgatcctgatcacggaaaatggtattgccgatgctaccgacgaaaaacgttggaaatacatcaaaaaagcgctggaggcagttcacaaatccctcaaaggcggtgcgaaagtgatcggctacatgtattggtccttaatggataacttcgaatggagcgagggctacagtatgaaatttggactgtacaaaacgaaacgcaacccgctggaacttgttccgcgtagcagcgcgtctaaatacgccgatgtgattaagaacaacgctctgaccgatgatgattga

SEQ ID NO: 594 - DNA, 2241 bp, Artificial Sequence
  6xHis UPI0001CD671F
atgcatcatcatcaccatcacgaaaatttatattttcaggggtcaatggaacgtgattcacgcaaacgggccgaagcgttactggcacagatgaccgccacagaaaaagtgggtcagctgaatcaacatctgtatggctttcgcatttaccacgtcgaagatgggaaaattatctttacgcaagaattgaaagacgaagtgaagaagtggggcggcattggaacaatctatggcctgtatcgtgcagatccgtggtccgagaaaaactacgaaacggggcttgcaggtggcttgagcatgcaagcctataaccagctccagaagtatgttattgaacattctcgcctcggcattccgtttttactgtcaagtgagtgcccgcatggttaccaagcgctggatggttatctgctgccggtcaatctcgcggtaggtgcttcatttgacccagctttgtacgaacgcgcgggccaggtttgtggccgtcaattaaaacagatgggtgtggatttcgctctggtgtcaacccttgacattttacgtgatccgcgttggggtcgctcggaggaatgctatggcgaagatccgtatttatcagccgaattagcgcgcgcgattgtaacgggtattcaaaaagaaggagtggcggtggttgcgaaacacttttgcgctcagggggaaaccactggtggtgtgaatgcgagtgccgcacgcatcggtgagcgcgaattgtgggaaattcatcttcaggcagccaaagcgtgttgtgaagccggtgtaaaaggcattatggccgcgtataatgaaattgatggcaaattttgtcacgccaaccgccatttacttcaagacatcttacgcgagcagctgggtttcgatggagtggttatggcagatggtattgcaatcgatcagctggacattatgacgggagacaatatccggtccgctgcactggccctgaaagcaggcgtggatattagtctttgggacgagggctataccaaactggaagaagcccttaagcagggctttattacggagaaagaactagatcaagcggtgctgcgtgtcctgacgctcaagttcgaacagggcctcatggataagccgtacatcgacgagaatggcaaccgaaccgcgtcttattcagagaacggtgcggtgtcgtttccgatcgaagcgtatcaggaaagcgaaaagttggctcgcgaaagcgttgtcctgttaaaaaatgaaaatgtcctgccgatcggtcgcgccgaaaagattgccctgattggaccgaatgcagatgatatctacaggcagatcggcgattatagcccgccgatggatcgcgcgggttatgaaactctgaagtccggcatggaaaaggagtttggagctgacagagtgcgttgttataacggacacgaggtgggtacggcagttagcttagcagaaaacgccgacattatagtattggcgttaggcggctcgtccagccgtttcaaaggcgcactgtttgacgaaaacggcgctgcgaaggtgcaaggcgttctggaaatggattgtggagaaggtatggatacagctcgcttacagctgccgggcaaccagaatgaactgtttaccgcggtctgtgcactgaaaaaaccagtgatcagcgttgtgattgcaggccgtccgtatgcgatcccggaaatcgcccaggatagcgatgcgttgctgtatgcgttctatccaggtccgatgggaggtaaggctattgccgagctgttaagcgggaaatatgcaccgtcgggtcgtcttcccgtctcactgccgcgaaactgcggacagcttccggtgtattataatcacaccgtcagctacccggcaatgcattattgtgatatggaacacggggtcctgtacacctttggggagggcatgggctattcccacatggaatacgttgacatctgcttaaagaaacaacaggacgtttggattattagtgggattgtaaagaacaaaggcaatattgatgacacggcagttctgcagtgctaccgtaaggtgttatccggcgaactggttccgcgtgaacgtgaattggtggcattttcgcgtatcaaagtggagaaaggcggccagaaagcatttgagattgtcatggacgcagacaaattccgctattttaatgaaagcggcgccaaaatctataaaagtaaaattctgctgatggattcaggcaaaatcattttcgaggaatga

SEQ ID NO: 595 - DNA, 1464 bp, Artificial Sequence
  6xHis UPI0001E0DC00
atgcaccatcaccatcaccatgaaaatctgtatttccagggctcaatgctacataagaacctgaacccgtttccggaacactttctgtggggtgcgagcacgagtgcatatcaagtggaaggagcggccctcgaagatggtaaaggcccgagttgccaagatgttaaagaaattcccgcgggtacagccgatctgagtgttagcgtggaccattatcaccactacaaggaggatatcgctctcatggccgaaatgggcttcaaaagctaccgctttagtattagctggacccgcgtgttaccgaatggcactggcgaggtgaacccgaagggtattgagttctacaacaacctgatcgacgaatgtctgaaatatgatatcgagccgatcgtaaccatgtttcacttcgatatgccagcagccttagatgaacgcggaagttggagtacccacgattcagtagactggtttgccgaatacgcccgtgtactgtttgaaaatttcggcgaccgtgtgaagtactggttgacgattaacgaacagaatatgctgactctggtaggtccggtaatcgggacccttcacgtgccagaaggcacaaccaacttgaccaaagaaatctaccagcaaaatcatcatcagcttgtggcccaggccaaagcgatgcaactgtgtcatgaaatgctcccagatgcaaaaattggaccagcccccaacatttccctggtttatccggccagtagtaaaccggaagacgtcattgccgcacagaacttcaacgcgctgcgtaactggctgtatctggatgcctatgtgtttggggaatataataatcttgcatgggcctacctggaggaaaacgatgcgctgccgacagtaaccgacgaagaccgtgcgattatgaaagcggcgaagccggactttattggttttaattattacaataccgcgacagttgaggcgtctgatggctcagaagtggcgggcgccaacggcgatcaacagagtaatcaaacctttcctggttttgcgaaaagtgtcgataaccccaaccttgtgaaaaccgagttcgggtgggaaatcgatccgattggctttcgcgccacggtacgtgaaatgtattcgcgctaccgcctgcctctgctggtgacagaaaacggtcttggtgcctacgataccctgacggaagatgggaaaatccacgacaactaccgtattgaatatttgcgtcagcacatcgcgcagatccagttggccattagcgatggtgtggacatgttaggttacaacccttggtccgccatcgacctcatttcaacacatgaaggtatccgcaaacgttacggctttatttatgtggaccgtaccgatgaagaggtgggttcactcaaacgctatcgcaaggactcgtttttttggtataagaaggtgattgccaccaacggtcaggatctgtccgattga

SEQ ID NO: 596 - DNA, 1221 bp, Artificial Sequence
  6xHis UPI0001F80C4B
atgcatcatcaccatcaccacgaaaatctgtactttcagggcagcatgatccgtaacacgatgcctaactccaataaaggcctgggcactacggacgtgctgcccattagtgaacctcgtattggcgtgctgaccggcgaaatcaactacaagaaagtgccgattggcgcgtatgatctgttaggccagttcaccctggcgagccagccgaactacgtttcggaccttaacatgattcagagcatgggcttcaacgtgtatcgcattagcatctcatgggcacgtatctttccgaccggagaagaagcgcagcccagcgaagaaggcctgaaatattatgaagcaattatcgatcaggtactgcagaaagacattgagccgatcgttaccctgagccactttgatctgccgctgcatctttatgagaaatacggcgcatggaaatcgcgcaaaatgctggaactatacgagcactataccgaggccgtgttccgccacttcaaagacaaagtgcgctattggattacctttaacgaatttaatatcctgcaccatctgccttatcttggcggcggtctgagctttgaagatggcgaaaaccgcaatcaacgcatctggcaagccgcacattatcagttagttgcgtccgcacgcgccgttaaactgggtaaaagcattaatccagagtttcagtttggtggtatgctggtggtcagccgtaattacagccagaaccttgactccgccatcgatgcgatggaggccgaagtcaagaatcgcgaaaattatgtgtttaccgatgtacaggtgcgcgggagttacccgaatcacttcttacgccgtctggaacgcgaacagattgcattggatatcgagaatgatgacttttttgacctgcgcgtgggtaaagtggattttgtgagctttagctatcatgcgtcgagcaacagtcaggaagttttcattaacaagtacggctacaataacaccaacaagaaccccatcgacccagttggtttacgcctggccatgaataacctgtatgaccgctaccagaaacccctgtttatcgtggaagatgatttggtgctagacgaatctgatagccgctcgattgaagaactcaaaacgaacatccaggaaattgtgaaaacggtggagtacgacggcgtggaactcctaggctataccccgctgagctgggtggatctgaatttctga

SEQ ID NO: 597 - DNA, 2244 bp, Artificial Sequence
  6xHis UPI0001D2DBBC
atgcaccatcatcatcaccatgagaatctgtattttcagggcagtatgtctgaaaaggatgcacgcctgatcaataaactgctagagaaacttaccctggaagagaagattggaatgattcatggcgcctccctgtttcgcacgaaaggcgtagaacgtttaggcatcccctctctaaagatgtccgatggaccgatgggcgtcagaatggagttcgctgataccgaatggcgcgccgtgggcaatactgatgattatgtcacctacctgccatcgaatagcgcgatcgcagctacctggaatcgtgaacttgcaggtaaagcaggagaagtgttgggagaagaagcacgtggacgtggcaaagatattattctggccccggggattaacattaaacgtagtccgctgtgcggtcgcaacttcgaatacatgagtgaggatccctacttggttaaagaattgaccgtgccaatgattcgcggcattcagaagtacgatgtggctgcgtgcgttaaacatttcattgctaatagtcaggaaacccaacgtttgtgggttgacaccttagtcgacgaacgtactcttcaggaaatctactatccggcctttaaagatgcggtcaaacgggccaatacctactctctgatgggcgcgtataatctactgaatggtaaacactgctgtgaaaatgaaaaactcctggatgaggttctgcgcgagcaatggggctatgatgggacgattgtgtctgactggggtgcagtgcacaatacacaggcggccgcggaatgttcactggacgtagaaatgaacattaccaacgatttcgacgattactgcctcgcaaagccgctgttaaaaaaggttaaatcgggggaaattgatgagctttgcatcgacaacaaagtcaagaacattctgcgcatgatgctgcgtctccacatgattggagatcaagtggaagaaaggaaagcgggtacctataacaccaaaacccatcaggaggcagtgctggaagtggcaagggagtctgtgattctgctcaagaacgataacaacgaactgccgctgaaaaaaaaaggcctgaagaaaattgcagtgattgggcaaaacgccgtgcagatccatagtaatggtggcggttccgccgaggtaaaagctctgtacgagattagcccgttgatggggattaagaagatcttaggcggtaacgcggaggtagttttcgcggaaggctattatattccgaagcgttgcgaagagtccgatcagaactggcaggcgaccagcatttacgacaaaagcttagagattgcagatattacaggagagaacatcggtggtaattcggaggaccgtatcgaggaacgtcgcaaacagatccaagatcaactgcgtgaagaagctgtcgccctcgccaaggaggtggaagtcgtaattttaattggcggtttgaatcacgactacgatgtcgagggactggatcgtgagcacatgcgcttgccttacgaacaagacgcgttaattcaggccgttttagaagcgaacccgcataccattgtggtgatttacgcgggtgcgccggtcgaaatgccgtggattgaacaggcagatagcgtagtttggtcatattatgcaggtatggaaggcggcaccgcactggccgaaattctgtggggtgaagttaatccatcgtccaagctgccggagacctttatcaaaaaggaaattcagtgcccggctcatttcatcggcgaatttggaaacaaagacgttgtggcctacaaagagggcatcatggttggttaccgctactatgacacctattgcactgacatcctgtttccgtttggctatggcctgagctacaccgaattcttgtacgacgacctgaaagtgcagttgttggaaaaagaaaacgagctttcggtgatcgtggaagcctctattaagaatattgggaaccttgaaggtgccgaagtcgttcagctgtatatcgtagatgtcgaagcatcagtggagcgcccactccatgagctgaaagcgttcgaaaaaataaacctgaagccggaggaggtacacaaaatccaatttgtgctcaacgaggaagccttcagtttctactctatcgaagatcgttgctttcgaattgaagatggagccttcatgatccaagttggttcaagcagccgtaatatccacctggaggaagaaattattatcacgcgcaactactttaaatga

SEQ ID NO: 598 - DNA, 1446 bp, Artificial Sequence
  6xHis UPI0001C48657
atgcatcaccatcaccatcatgagaacctgtactttcagggtagcatggcgacttacacctttccggagaacttctggtggggcgcggccaccagtggtccgcagtcagaaggtcgctttaacaaaaaacacgccaatatgttcgactactggtatgagatcgaacctgaagtattctacgatcaagttggtccggatacagcatcgaacttttacaacagctataaagaagacattgcgctgatgaaaaaagtcgggctgaacagcgtgcgtactagtattcagtggacccgcttgattgatgatctcgaaacgaatacggtgaatcaggatgcggttgacttctataacaacgtgatcgactgcttcattgagaatggcattcgtccgattatgaatctccaccactttgacctgccggtggagttgtaccacaaatacgggggttgggagtcgcgtcacgtggttgacctgtatgtgggttttgccgaacaagccttcaaagcgtttggcgatcgtgtgaaagattggaccacccacaatgaaccaatggtcgtggtagatggcgaatatctgtaccagttccactaccccaaattggtggatggcaaaaaagctgtccaggttgcgtataatctgaatattgcaagcgcgaaggcgatcgcgaaattccgtgaactgggccttgataaggatggtggtcgtattggtaccgtgctgaatctgactccgacttatgcagcgagtgactctgaagatgatcaagcagccgcgcattttgcggagctctggaataataaaatgttccttgaaccggccatcaacggtcatttcccggaggaattggaggcagttctggagaaagatggtgtaatttggcagacggagccggaagatgcggaaatcttcaaaaacaacaccgtggatttcctgggagtgaatttttaccatccgaatcgcgtgaaagcacctgacatcgctcctaatagcgtgggcgcatggctgccgtctcgttattacgatgaatataacatgcctggtcgtcgcatgaacatcgataagggctgggaaatttatccagaggcgatctatgatattgcgatcaacattcgtgacaactacaaaaacattccttggttcgttagcgaaaatggcatgggcgttagccgtgaagagcgctttatggacgagagcggtcaagttcaggacgactatcgtatcgatttcattaaagaacacctggcctgcctacaccgcggtattgaagaaggcagcaactgttttggctatcacctatggaccccgattgattgctggagctggatgaacgcataccgcaatcgctatggctttatctcgaacaacattcacacccagattaaaaccatcaagaaaagcggcgaatggtttaagcaagtgacagtggacaacggcttcgaagaatga

SEQ ID NO: 599 - DNA, 2424 bp, Artificial Sequence
  6xHis UPI00021D443A
atgcatcatcaccaccatcacgaaaatctatactttcaaggttcaatgacccgcgacgtgaccgagaccctgctggatcagatgaccctggaggaacaggtttcgcttcttgccggtgaaacatactggcgcacaccggaaattgcccgcatcggactgcccgctattaaagttaccgatggtactaacggtgcacgtggcgaagcattcagcaacggcgcccgtaccgccgcatatcctgccgaggtcgcacttgccgcgacctggaacgttgatctagttcatgaaataggggtcgatctggcagctgaagtgcgcgcgaagaaagcgcatatcatcctcgcccccgcagttaacatgcaccggaatccgttgaacggccgcaattttgagaatttttcggaagacccgcacctagcagctcgcatggcggtggcatttattaaaggagttcagtcacagggtgtgggagcaactattaaacattttgtcggaaacgaatgcgaacacgaacgtcgcagtatcaattcggcaatcgacgagaaaaccctgcgcgaagtgtacctgcctccctttgaagcggcagtgcgtgaagcccgcgtgacatgcgtcatgaccagctataactggttaaatggagtgcacactagtgaaaaccagtggctgataggggatgttctgcgcggggaatgggggtttgatggtatcgtcatgagtgattggctgggcacgcacagcacggaagcagccattgaagccggcctagatttagaaatgccgggtcccggtaaacaccgcggcgaaaaactcgtggccgcggttcgtgaaggtcgagtagatgcccagaaagttcgtgctagcgcaggccgcatcatcgacatgggacagcgcctgggtaccgatatcgcagatgatctgagcgacgaaaccgccatcgatcgccctgcgacccgagcgctgctacgcaaggcagcggctgagagcacggtactgcttacaaatcgtggtgggctgttgccactggcggccccgcagcgcatagccgttatcggccccaatgcagctgtggcagtgatacatggcggcggctcggcacagattaacgcccattatgccgttactccgctggatggattgcgcgccgccttgcctgatgcgcaggttgactacgcgctgggtgcagccgccgaacgctttgtgcctgctatcaccggagctgttaccatcgccttatttaatggagaatcccgagatggcgcccctgcattagtacagcaagcgcctgataccgcgttcgcttggtttggtgcggttgcaccagaagttgatcactctgctttcgcggcgcgtattacttgtacccttaccgcgacgcagtcaggtccgcacgaaattggcctgatgtcggcgggactgtctaaactgtatatcgatgacgtggaagttttagacgcctgggaaacatggcagaaaggtgagagctacttcgggcatggtagcgacgagaggcgcggcgtaattgatctggtggccggacaaacgtatgccatccgatgtgaatatttttgtggcgacgggattgcgaccagcctaaaagctgtgcgtttcggtctgagggccgtcagccagaaaggggacctggatgccgcatgccgtattgctgcggcagcagacgcggttgtaatcgtgaccggcctgagtccggaatgggaaacagaaagcgaagatcgccgctccctgagcttgccacctggtcaggacgcgatgattgcggcaatagcagcagtcaatccgcgcacagtagtggttctgcaggcgggtgcaccacttgccatgccgtgggcccataatgtcggtgcggtcctgcagcagtggtatccgggtcaagagtgtgggaacgcactggctgatgtcttgttggggattcaggaaccatctgggcgtctgcctcaagtgtttcctgcgagtgatgaccagattactgcagtgacagaacgccccgcgagagggggtactgtcacgtatgcagaaggcgttgcgattggacagcgtcgctttgatgctttgggcctgaaacctctttttccgtttggccatggtctggggttcggtcaggttgaataccttgacgcgcaggcgctcgacggtttatgcgtgcaagtgagattagcaaatcatgcggaaagagcgacccaggaagtcgtgcagatctaccacaatctaccgaacggccagcgtaagttgctggcctttgcgaaagtggtggtgccagcgggcgcggaggttagcgcaactctgaaaatcatgccggaaggtttccgtgtctgggatggaggctggacatatccgtatcgcaccgcagatttagcgattggccgtagtggtgcggacatccgtctgatgttggcaattactttggaatga

SEQ ID NO: 600 - DNA, 2001 bp, Artificial Sequence
  6xHis UPI000228255D
atgcatcaccatcatcatcacgagaatctgtacttccagggctcgatgaccgcgtacaataaagtgaatggcgttcacgtctccgaaagtaaagcgattttgcaaggaattttgagaaacgagtggaaatgggatggctgcacgatgtctgactggtacggtacatacagtacgaaagattcgctggatgccggcttaaatctggaaatgccagggccgacccgtttccgccaagtgttacaaactgttcaccaggttcaggccaatctgatccatcccaaagtcatagatgataacgtgcgtcaggtcttaaaactcatcaatcagggcctgaaggcaggcatccctgcagacgttattgagtcaccaaataactcaccggaaagctccaaaacgctgcgcaaagtgggcgatgaatccatcgttctgcttaagaatgaggaaagcattctgccgctgtctaagaccgctaaggaaaccatcgcagtaattggtcccaacgcaaaagcaagtcaagattctggcgggggctcagcgagcctgaccgcgcgatacaagaccaccccgtatggaggtatcgaagagaaagttaaggaaggcaataattcgattaaactggaatatgcgctgggcgcgtttctggataagaacgttccggatagcgcggcaattctggaaagcgaatcaggcaagaaggggcttatcactgcacgcttctatcacaccgcgccgggtacaccggatcgtaaaccgtttgacgaactaagcctgaacacgacccgtattttcctgaacgacttcaaatccgataacctgagcctagaacagctgctgtactatgcggatttttctggttactttacccccgaagagagcagcgaatatgaattcggttgctctacgtttggtagcgcccaggtcttcgtagacggcaaattggtagttgataacaaaactaaacaagtaaaaggcgacgcattctttctcgcgatgggcacccgcgaagaacgtggtagcatttatctggagaaaggcaaaaaatacctagtgaaagtagaatttggaacaagtccgacatacaccttagccaacggcagtcaggaaccgggtggcgtttattttggtgtgcgcatcaaatcaagcccggaagacgaactggcgaaggccgttaaagttgctaagagcgccgacaaagtggtgttagttgtcgggctgagcaaagagtgggagtctgagggtttcgatcgaccggatatggatatcccgggttataccaataaattagttgaagaagtggccaaagtaaaccccaatattattgtagtcaaccagagcggatcgcccgttactcttccgtgggtggataaaaccaaagccctggtgcatgcgtggtatggtggtaatgaacttggtaataccattgccgatgtactgtttggagattacaatccgagcggtaaattatccgtgtccttccccaaacgcctcgaagataacccgtcattcgttaatttcggtagtaacaaggggcaagtatggtatggcgaagatgtttttgtgggctaccggttctatgagaaggtgggtcgtgaagtcctgttcccgtttggcttcggcttaagctatacatccttcgatttcaaaaacctgaaagttgacaccaccgaagacagcctggtggtcaaagtggacgtaaccaataccggcaaggtggatggagcggaagccgtccagttgtacattgagcaggcgaatccgtcgatcaaccgcccagttaaagaactgaaagacttcgaaaaggtctttttaaaggccggagaaaccaaaaccgtggaactcgaagtgtcaatcaaagaggcgacctcttactggaactctttcgtgaaccagtggcagagcgataaagatacgtataaggtactggtgggcaacagctcagataacattcttgtcaaagacgaattcaccacgaagaaaacgttcacctggtcgggtttatga

SEQ ID NO: 601 - DNA, 2280 bp, Artificial Sequence
  6xHis UPI00023F6F5F
atgcaccatcatcatcatcatgagaatctgtatttccagggatcgatgaaccgcatctaccttaccttttgctttgccattggtcttagcgtgatccatctgaaagcgacagcgcagaagaagacgatcgaccaacgcgtagattcggttctcaagttgatgacgttggatgaaaaaatcggtcaattgaaccagtacagcagcaaagaagagttgactggtcctgccggtgagaacagcaatatcgcgcaggaaatcaaagcgggtaaagttggcagcatgcttaacgtgcgcggagccgatcgtacccgccgaatgcaggaactcgcgatgcaggcccgtatgaaaatccctctgctgttcggacaggatgttattcatggctacaaaatcacattcccgattccgctggctgaagtagcctcctgggatctgacagctatcgagcaaggtagccgtatagcagctattgagacggcggctagtggagttcactggacctttgcgccgatggtagatattgcaagagatccgcgctggggccgtgtaatggaaggtgcgggggaagacccataccttggatcactggttgccaaagctcgcgttaaaggcttccagggcaagggcttgggcaacttggatgcaatcatggcgtgtgccaagcatttcgcggcctatggcgcggcaatcggtgggagagattacaacagcgtggatatgtcggaacgcaccctgtgggaagtatatctgccgccatttaaagccgcggccgaggcaggtgcggcgacttttatgaatagcttcaacgatttaaacggcatcccggccacgggcaacgcctatctgcaacgtgatatcctcaagggtcgttggaagttcccgggatttgtcgtgagcgattggggcagcattggcgaaatggttccgcatggtttcgttaaagataaaaaagaggccgctgagtcagcgattaaggccggtagcgatatggatatggagagccgctcatacaccgctcatttagcgcagctggttaaagatgggaaagtgccggtggcactcgtggatgatgccgtaaagcgtatcctgcgcaaaaagttcgaattaggcttgttcgatgatccgtatcgctttagcaatgtccagcgcgagacggccaccgttggcattcctcagcatcgtgaagtcgccaaagacatggctcgcaaaagcatagtgctgatgaagaatgaaaagggccttctcccgctgagcaaaacaactaaaaccattgccatcattggcccgcttgcgaaatcagaagatgatatgttagggttttggtccgtagggtggcctgacaattcagacgtggtcagccagtgggagggtatccagaacaaagtaggaaacaacgcaaaattgttgtatgcgaagggctgcgatgtttctgacacatcacgtgctggctttgccgaagcgatagcggcggcccagaacgccgatgtggtaatcgtcagtgttggcgagaggcgtgaaatgtctggcgaagccaagtcacgtgccaacattcatctgcctggtgtgcaggaagagctactgcaagcgttgcaggcgaccggaaagccggtagtagtcctgatcaacgcgggtcgtccccttgtgtttaattggaccgcagataacatgccggctattttatacacgtggtggctgggaagcgaagctggtaacgccatcgcggatgtgttgtttggtgactataatccgagtgggaaattgcctatgagctttccgcgtacggagggtcagattccgatctattataattattttaataccggccgaccggccccggatgacgataacccggcacgttatcgttcgggctatattgatctgcagaaatcgccgcgcttcgcatttggtcatgggctgtcctacaccacatttacctattctgacctgcagttatctaaaccggccatgagcgccggcgacagtatcgtcgttacgtttaagctgacgaactcgggcaaagtggcgggtgaagaagtggcgcagttgtatctgcgtgatgaaatagcgtccctggtgcgcccggtgaaagaactgaaagatttcaagaaactgatgctgcaaccgggggagacccagacagttcgctttgtgattaagaaggacaaactgtcattctacaaccaacagcttcagtgggtcgccgagccgggggatttcgatctgatgatcggcggcgcaagcaatgatatcaaattgaaagggaagttcgagcttaagtga

SEQ ID NO: 602 - DNA, 2445 bp, Artificial Sequence
  6xHis UPI000260108C
atgcaccaccaccatcaccacgaaaatttgtatttccaggggtcaatgctgaaaactgacggtacgaagtgggtgaaagccagtggtcgccaagttcatctaaaaggcacgaacttaggtaattggctggttcaggaattttggatgatgggtcaaggcggaaatggggtccatgatcagtgtaccttggaggcagaactgactgagcgcttcggctatgatgaaaaagagcgactgattaagctgttccgcgataattggatcaaagagagggactgggatcagttgcaggcctttggattcaatgtcgtacgcttgccgattctgtggaacgtgatcgaggatgaaaagaacccgaaaaccctgcgtgcggatgcctggcattatatcgattgggcaattgctgaagccaaagaacgtggcatgtatgtgatcttagatctgcatggtgcgttaggcggccagacccctaacgatcacaccggctgcagcggtcagaatcagtattggaccaattctgaatatcaagatcgtaccaagtggctttgggaacaaattgcgacgcgctacaaagatgaaccggttgttgcggcctatgatccgctgaatgaaccgtggggcagcaccccggaagatatggccgaacgcgtgcttgagttatatgacactatccgtgcgattgacgataagcatattatcatgctgcacagccactatggtagtattgatgtgtacggcgatccggccgaacagggcatgaccaatgttgcatttcagctacacccgtatccaggtttgttcggcgatcgtcccaatgactcgcattatgacattcatcgtgactggttgaagtgtggccaggatggcaaagggggtgtgtgcttttgggataccaaactggaagaacttcaaactccgatgttaatgggcgaattccagccgtggcagggcgcgggtcttgaactgggcggcaaaattggacgtgcgacctacgatatttttgccgggtatgattgggcctcgacctcgtggagctataagctggttaccattgccggaggacaaggtaatgggctgtgggggatggttacaaacgaaattaacacgtcgctggataccggcgtgggcatgattacaaaagcgtcaacatgggactgcaataactgggattcaagtttcgcggaggcatgcgctaaaaaagcgaccacaattaccaccgggggcactgaagataaaacctactacctggtgattaaaactggtgcaaacgggggcgcctcaccggatgtgacctttgattctattagcctgaaaaacacagctactaacgaagaactgatcgccaatggaaactttggcgccgcggggggttggagtgaactgacgatttcaggtgcccttaactttaactataacaacaccgacacaagcaaagcgcctacgggttcagatggcgccgtgttacacataactcgcccgtcaggagttgagggcgagattaatggtgccctgtatcaacaaattactttgaagggaggacaaacgtataacttttccggtgtgttcaaaggaaatggttctactaatacctgggcagaaatctatcttattgaagaagaaccggtcgcaggtaaagatgttgttgactcggcggggaaagtagattttactaccgcgccaatcgaggaaatagaagcgttattcacaagctacggggaagttggctacgatgtacatgaaggcctggcacattggctagtaaccgatgaacataatgatgtttttgattatcccgaccgaccgaccggtctggctctgacggtgaccggtaccaatgcaagcttgacttggaccgcaaccccgggcacagacatttcatataatgtgtatcgtagcaattccgcgggctccaaaggaactcttatcgcagaagatcttgcggttacctcgtatgcggattccaacctgtcggaagaccagacctattattactcagtaacggcccggaataatattgcagaaagctacgcctccgatgcggtgaacacccctatcctttttaccccggtgccggcgaaaattgaagccgagaactacacagcacaaagcggcagtcaatctgaaaataccggtgactcgggtggaggccagaatgttggtcattttgaagcgggcgactttgtggaatacaagattaaagtcgaaacggccgggaactacattattgagtatcgcttggccagccaaaccgggagcaccggctttaatgcacttattgatggagcgattgttgacactcaaacactggcgccgacgggcggctggcaaacgtacatcacccagagctcaggcgcgattgctctgcaaccgggcaactacaccctgaagcttagcagcattggcaaggaatggaacctgaattggattaatatcaaagcccagtga

SEQ ID NO: 603 - DNA, 1398 bp, Artificial Sequence
  6xHis UPI000272D1E0
atgcaccaccaccaccatcatgaaaatctgtatttccagggatccatgaacaagattgaaagcagtttcctgaaccgcaatcagttcggcgaagactttttgtggggggtaagtacagcagcgtttcagattgaaggtgcgcatgacgcggacggcaaaggtagctctatttgggacgtgtttacgtcgcagaagggcaaaatcaaaaatgggcaccatgcgcttacggcatgcgacttctataactgttatgaggacgatatcagcctgatcaaagagctgaacatcccgaacttccgcttttccatctcctggcctcgcattatgcctaccggcattcacccgattaaccaagccggcattgactactacaataaaattattgactccctgctgtcgtctggaattgagccttggatcaccctgtaccactgggatcttcctcatgaattggaagtgaaaggtggttggaccaaccgcgagagcgtgtcgtggttcaaagaatacgttgaggtgtgcgtccagtactttggtgatcgcgtgaaaaactggatggtgattaacgagcctagtgtatttacaggcgcgggctacttcctgggcatccatgcgccgggtaaaaaaggtattacaaactatctgaaggcgatgcatcacgtcacccttgctacctctgcaggtgcgaaaattatccgcgaacgtatcccgaatgcgaatattggcaccacgtttagctgcacccacattgaaccggccaccgaatctagtaaggatgttgaggcggccaaacgtgttgataccctcttaaatcgcacctttatcgaaccgattctgggtctgggctacccgcaaaaggatctcccggttctgaaaaaacttaataattacatcctggaagatgacttaaacaacctgaacttcgattttgactttattggcctgcagtgctacacgcgcgaagtggtgaagtcgtcgatcctcactccgtatattggcgccgagctgattagcgccgaaaagcgcaacgttattagtaccgagatggggtgggaagtatatccgccggcgatgtaccatatcctaaagaaattcaacgagtacaacggcatcaaaaaaatcattatcaccgagaacggcgcggcgtttccggacacggttcagaacggtaaagttcacgatattaagcgcacgcacttcattcaggataacctggaacagatcctgaaagcgaaaaatgaaggcattaacgtggacggctactttgtgtggacgctgaccgataactttgaatgggccgagggctataacgcgcgcttcggcctgattcatgtggactttgagacacagaaacgcacgattaaaaacagtggcctgtggtttaaagattttctgagctga

SEQ ID NO: 604 - DNA, 1923 bp, Artificial Sequence
  6xHis UPI00028E7FE1
atgcatcatcatcaccaccatgaaaatctttactttcagggtagcatgaagaagattctgcgcgacgagtggaaatatgatggcatggttatgtctgattggaccggtactaacagcgttgcagaagcgattgcggcagggtgtgcactggaaatgcccggtccgacaaagtggcgtggcgaacgcgcgattcgtgcagttgaaaaaggtgagttaagcgctgctgacgtggagcgcgcggcgggtgatgtgttgtatttgattcaacgtactaaaggatttaacaacgacgcgccagaacccgacgaacgtgccaacgataacccggcaattcgtcaagtgatccggcaggccggtgccgaaggccttactctgctgaagaatgaacgtgggctgctccccattaccagcgcgaaaaaaattgccattatcggtccgaatgcaaaacgtgcgattgcaggcggtggcggctcggcgagtttaaacccgtattataccactaccccgttcgatggtctggcgaatcacttcgagggcgaactgatttactcacgtggctgcgataccgcgaaatggctgcccttagccagcccgttctgcaccaccgtggacggtaaaccgggcgtgacccttgaatacttttgccaagatcgctttgaaggcgcgccggcgagcgtccaacataaagcaaacaccgatctgtttctctgggacagtgccccgaaagcagtgttaccagcatattcgttcaaggttaaaaccattctgacgccgaaaacctcaggcacccataccttcagcttttccagcgttggccctggccgtttatttttggatggtgaactgtttattgacaattgggattggacggaagaaggcgaggcaatgtttgaagcaagcgaagatgtgattcagagcatttacctggaggaaggcaaaccggtacgtattttagtggaatcgaccaatgaggttcgtccagcaagcaaaatcacccacggtcgacctacccatgcctatggaggctgtcgcattggctacgaagaagagagccgaattaacttactgcaggaagccgtagatgccgcaaaaaaagccgatgcagcagtagttttcgttggtttagacgcggaatgggaatccgaagggtatgatcgccaaactatggatctgcctaaaaacgggtcccaggatcgtctggtagaggcggttgttgccgccaatcctaacactattgtcgtaaaccagtcaggtacgccggttacgatgccgtggtctgagcgcgtcccggcgattctgcaagcctggtatcaaggacaagaagcgggcaacgccctggctgatgtgctgctgggccgtcaatcgccaggtggcaaactgcctactacctttccgaagaagctgtctgataatccggcctatcacaattggccgggagaaaacgccaaggttgtgtacggcgaaggcatttttatcggctatcgccactatgagcgctgtggtattgaaccgctctttccgtttggtcatgggctgagctataccactttttgttatggcgacgctattattagctcgcgtaccttggaagccgggggcgtagttaaagtcagtgtgcccgtgaccaattccggtggattcgcggcaagtgagatcgtgcagggatacatccgcgatattaaatctaaactgccgcgtccggaaaaagaattacaagcgtttgggaaagttttcctgcaaccgggtgaaactaaaactgtgcatttactgttcgataagtactcagttggatactatgatacctcgctggaggcatatattgcggaggagggcagatttgatgtacttgtcggttcatcgagcgccgacattcgttgcagcacgtcctttgaggtgctggagagtttcacttgggttttttga

SEQ ID NO: 605 - DNA, 1407 bp, Artificial Sequence
  6xHis UPI00018483A2
atgcatcaccaccatcaccatgaaaatttgtatttccaaggatctatgccggaaaaccgcgtaagtgccgaagattttccagagggctttctgtggggcgtagcgtcttcaagctatcagattgagggtgccgatctggaagatgggaaaggtccgagcatttggaccgaatacaccaaatataaagacaacatcgtagacggcgaatcaggcatgatagcgtgcgatcactaccatcgctacaccgaggacatttttttgatgcaggatctgggtgcgaatgcgtaccgttttagcgtgagctggccgcgcatttttcccgacgggtacggtaaaccgaatccgtttggtctggatttctacgaccgtctgattgataacctgctggaagcgggcattaccccgtttcttaccttataccactacgatctgccgttgaaattgcaacaggaacaccgtggttgggaatctcgtgaaaccatttcatacttcctggaatacgcccactttctgtttaagaagttcggcgatcgtgtcaaatactggattaccctgaatcagcccctgcgtatttcgcatcgttcatacattgatggtaaagctgcgccgggcaaaggcaaatccccgaaagacagctttcaggttgcgcaccatctgttattagcgcatgcgggcgctacgaaaattatgaaacaggagattcctgacggaaaaatcggcattagcaacagctcgatttacgtggagcctatcgaagatacgccggaacataaacgcgctgcactgctgctagaccaattttataacgattggttctacctgccgcccgtgagcggcaagtatcctgaggagctgatgcttgaactcaaaaaacgtggctgggcaccggaaatggaaccggacgatatggataacattgttgccgaacaggacttttgggggattaactactacactcgtgcactggcgattcagagcaataactcccttctgggtttcgcgcaggccagcccaaaatttccagctacgcgtcgtggcgcagaaatctatccgtgcggcctgtttctggtgctcaagaagatccacaaaaacttcgactcgaaacagatctacattaccgaaaacggcatggatctcgattccccagttgcaagtggtaaactggaggataccgaacgcattattttcctgaaggagcacatcgtgcagctgaaaaaagcggtagattctggcatccctattaaaggctattttgtatggtcactgttggacaactttgaatggactagcggctacacccttaaattcggcctagtgtatgtcgatcgcaataacgggctgaaacgtatcccgaaagccagctattacttctaccgcgattttattgccggtaagattagcctgtga

SEQ ID NO: 606 - DNA, 2508 bp, Artificial Sequence
  6xHis UPI0001CD5918
atgcatcaccatcatcaccatgagaatttgtattttcagggcagcatgaaagtgggctggaaaaccgtcatgaagcaacagaaactggttgagaaaatgacgatcgaagagaaggcggcgatcctgtcaggcaaaactgtttggcagacccgtgaaattgatcgcttaagcattccgagcatctttctgagcgatggtccgcatggcattcgcaaacaagctggtgccggtgaccatctcggcctgaacgcaagcttgaaggctacgtgctttccgacggccgcaaccattgccaattcgtggaatcaggatctaggagaagaaattggtcaagcactaggggaagaagcggccagcatggatgtgaatattcttctgggccccggattgaatattaaaagaagcccgctctgtggccgtaattttgaatatttctccgaagatccctacctgtcaggaaaaatggcagcgagctatatccgcgggattcagagcaaaggcgtttatgcctgcccgaagcacctggcggtcaatagccaggaactgcgacgtatggcgatggacgccattgtagatgagaggaccctccgcgagatctatttaacaggttttgaaatcgccgttaaggagggacatgcaaaagccattatgtcatcatataatcagatcaatggcatctatgccaatgaagacaagcatctactgaccgatattctgcgcaaagaatggggcttcgacggaatcgtggttaccgactggggtggctcaaacgaccatgtaaaaggcgtggcggccggctctaacttagaaatgccgagctgcggttatgattcagcccgtgaagttattgcagcagtccgtaatggcaaactgaaagaagcagatctggacgaacgcgtaggcgaactggtggacgccgtcatggaactgacgtctgggaaaaaactgagcgataaaaattttgatcgcaatgcccaccaccagctcgctcgtaaagccgcggccgaaagcatgattttattgaaaaacgagaaacagattctgccgttggataccaaaaaaagtatcgcagtgattggtgactttgcgttctctccgcggtatcagggcgccggaagctcgatggtgaaccccacgaaagttgaggatatgagtagcatcctgcagcaatatgacctgaacatcctgggcatgactcgtggctaccagcgcaacggggacgtagacgaaaacgatcgcaagtttgcacttaacttagcaatgaatgcggatattgtaattttttgctttggattggatgaaatttccgaatcggagggcctggatcgcacccacatgcgtatcccgcaggatcagatcgaccttctgcaagacataagcaaggtgaatgaaaatattatcggcatcctttctgcgggtagtgcgattgaaatgccttggcatacctgctgtaaggccattctacacggttacttaaacggccaggcaggtgccagcgctactctggatatcctaaccggcaaagtgaaccctagcggtcgtctggccgaaacataccccatcagttatgaacagaccccggcttttcgctattatccgtctaacgagaagactagcgaataccgtgagtcagtatatgtcgggtatcggtactatgataccagcaaggtccgcgtgcagtatcccttcggctttggcctgagctacacggagtttacctatagcgatctcattattgaggaggatggtattaaagtgagcgttactaacacgggtgatcgtgatggcgcagaagtcgttcaaatgtacgtgggcctacctaacgcaattgtttttcgtccggaaaaagagctgaaaggctttgcgaaagtctatctgaaggcaggagaatcgcgtcagctccgtattccttttgatgataaaacgtttcgttattggaacattaaaaccgggcagtgggaaatcgagacgggcacctaccagattatggttggcgcaagtgtcgctgatatccgcttaaccggtatgacggaacgcaccggtaatagtaagggctatccgtataaccctgccaaaatgccgtactactataccggcatcgtacagaaaatctccgatgaagaatttcgcgagctcttaggacatgaaataccgaacagacgctggtctggcaatcttgaaattaatgatgcgatttgtcagatgtattatgccaaaagtcgcctggcacgtctgatctaccgctgtctgactaaaatgaaaaaaaaatcggaagcccaggggaaaccagacctcaacattctgtttatttacaacatgccctttcgcggcattgcaaaaatgaccgggggagcagtgtcgatggagatggtatacggaattgttgacgcggtaaacggtcactttatgttgggcgtgaagaaaattgtgggtggctacttccgtaatcggcgtaacaataaaaaatatgaaaagttgttgaaaggtgccgggggcaaatgccgctga

SEQ ID NO: 607 - DNA, 2292 bp, Artificial Sequence
  6xHis UPI0001E18CDA
atgcaccaccatcatcaccatgaaaatctgtattttcaggggtcgatgagcgaatccacctatccggaggttaacgacttaacgttagaagaaaaggcgagcttgacctctggtggagacgcctggcatctgcaaggcgtggaggccaagggcattcctggctatatgatcaccgatggaccacacggcctgcgcaaatcacttgcctcatcaactggtgagaccgatttgaatgactcggtgcccgcgacctgcttcccgcctgcggccggactgagtagttcttggaatccagaactgattcatcaggtcggtgaagcaatggcagaagaatgtattcaggaaaaagttgcggtgattctgggtcccggtgtgaacattaaacgcaaccctttgggcggccgttgttttgaatattggtcagaagacccctacctggcgggtcatgaagcgatcggaatcgtcgcgggtgtacagagcaaaggcattggcactagccttaaacacttcgcggcaaacaatcaggaaaccgaccgattacgcgtgtcggcgaacattagtcaacgcgccctgcgtgagatttattttccggcctttgaacatatcgtgaaagaagcgcaaccttggactattatgtgctcgtacaaccgtattaatggggtgcattccgcacaaaaccactggctactgacggatgtgttacgcgatgaatgggggtttgaaggcatcgtgatgagtgattggggcgcagatcacgatcgagttgcctcactaaacgcgggcttgaatctggaaatgcccccgtcatatacggatgatcagattgtttacgcagcgcgcgatggtcgtattcaaccagaacagctagatcgaatggcacagggcatgatcgacttagtaaacaaaactcgtgcggcaatgtcagttgaaggctatcgtttcgatgtagatgcacatgacgaagtggcgcatcaggcggcagtagaatctatggttctgttaaaaaacgacgatgcgatcctgcctgtcgctagtgatgcaaaagtggccgtgatcggtgagtttgccagaactccgcgttatcagggtggaggttcatctcatattacgccaactaaaatgacttctttccttgacaccctggcggcccgtggcgtcgatgcgaaatttgccccggggtttactctggatttagaaccggccgatgccgcgatggcagctgacgctgtcgaagttgctaaaggggcggatgttgtattgatgttcttaggcctgcccgaagccgcagagtcagaaggttttgaccgcgaaacgctggatattcctgctaaacaagttgaattactagaagcggtggctgcggaaaacaaaaatattgtggttgtgctgtctaatggctcggtagtatctgtggcgccttgggccgataatgcgaaaggaatcctggaaagttggctgctgggtcaggccggtggtcctgcactggccgacgtgattttcgggaacgtaagtccgtcaggcaaactggcccagactgttccgatggatatcaacgatgatccctccatgatcaattggccgggcgaagagggacatgttgattacggtgaaggcgtgttcgttgggtatcgctactacgacacctacgacaaagctgtggattacccgtttggttacggactcagctatgcgacgtttgaggtgtcagatgttaaagtggcaaaaaccggcgccaataccgcctcggtaagcgccgtcgttaaaaatacgtcggacgtggatgcggcagagacagtacaagtatatgttgcacctggtaaatccgcagtggcgcgcccaatccatgagctgaagggattccgcaaggtctttttaaaagccggagaatccgccgaagtgagctttgatctggacgagcgcgccttcgcctactggagcgaaaaatttgatgattggcacgtggaatcaggcgaatacgcaattgaagtgggtacctcctcacgtgatattgcaggtacgggcgttgtggaactggacggtgatgggaaagcggagccgctgaccgagtggagcacgtttggcgaatggtctgacgatccggttgggagcaaaattgtggcgtccgtctacgcagaaggcgaagcaggcaatcttccgaagatgccggacaatgatatgatgcgtatgttcctgcgttctatgcctatcaactcaatgccgatgctgatgtctgaaggtggtaaaaaaattaccgcctttatgctggatgaatatgccaaagttaccgagtga

SEQ ID NO: 608 - DNA, 2514 bp, Artificial Sequence
  6xHis UPI0001F55F8F
atgcaccaccatcaccatcacgagaacctgtactttcagggcagcatgaacgtgcacaaccaagataccattgaacagaaaatatcagaattgctctcccaaatgaccctgagcgagaaagtgagcctgctgtcgggcaaagatgcttggaggactatgccgattccgcgtctgggtattcctagtattacgatgacggatgggcctcacggagttaggagcagttatcccgaagcgggtcgcaaggcggggccgaccacttgttttcctaccggtgtcagcatggcggcgacctggaatactgcactgattgaaaaagtaggtatggcccttgccgaagaaacgcgtgcgatggattgtgatattctgctgggcccgtgcgtgaatatcgtacgccacccgctggccggccgtaatttcgaaagttacagcgaagatccctatcttaatggtaaaatgggcgtcgcatgggtgaaaggcctccagtcgaagaaagtcggtgccagcctgaaacactttgccgcgaataaccaggagtttgaacgccatcgcggtagctccgaactggacgaacgtactctgcgtgagatttatttacctcacttcgaaatggtcgttaaagaagccaaaccgtttacggtaatgtgtgcttataatcgcattaatggtgtctatgcctctcagaaccgccatctcctacgcgaaatcctgaaagaagagtggggtttcgatggtgtggtagtaagcgactggggcgcgaatcatacgatttttgaatcagttgaaaatgggttagatctagaaatgccgggtccggcccgttattatggtaagttgcttgaggatgccgttcacaactggcagattgatgagaaagttattgatgatgcggtgcgacgcattcttcgtatcctcttccgtgcaggaaaattcgatgatcccgcgacgttgccgcctggatcggttaatacacctgagcaccaggcattagcgctggaagtggcagaggaagcgattacactgttgaaaaatgaagccgacctgctgccgctcgatatagaaaaaattcgcacgctggcggtcatcggtcctaatgcggcggaggatcgtattggcggtggcggcagttcgtatgtagatccgccctatcgcgtttcgcctttggaggcattgcgcgcgcgttttggcgataagattcagatcgaatatgaaaaaggctgcgacaattaccatcagccgccggtgctgggagccgactggttaggcgtcaacggcctaaaagttgatttttttgataacccggccctacagggacagccggcgggtacgatttcgattcccaaagccgaaatgtggatgtgggctaattccctgcctgcaagcaaaattacttctccacgcttcagtctgagagcctcagggagttttaccccgttggaatcgggcaactttacctttttcctggtcaacaccagtacgtgccgtgtttttattaacggcaacaaagtatttgaaaacacctcgaaacctaaggaacaccgcgcggaaagcgaagtacaattccagaccaccctggaagaaggcaaaagctatgatctggtgatcgaatacctgaaggataatgatgaagaatttgccttttggaaactggcctgcatgcgcgtgtttggacctggtgaggacaaccgtattcagaaggcggcggaattggcggccaaatcggatgttgcgctcgtgtttattggcatgccggagggcttcgaatctgaaggctacgatcgtccagatatgcgtctgcccggaccgcaggatgagctggttcgtgcggtactgaaagccaacccgcgtacggtcgttatattaaacgcgggaagtcccgtcgaaatgccctgggcagaagatgttccagcgatcttggaagcctactaccccggtcaggaaggtggcaacgcggtcgctaagattttgttcggtgagattaatccgagtggcaaactgacagtgacgttcccacgccgtctggaagacaccccagcatatattaattacccaggcgaccgtaaggtgtactatggcgaaggcattttcgtcggttatcgttactacgagaagaaaaaagttagccctctgtttcctttcggccacggcctcagctacaccacgtttgagtatgaaaatctgacgcttccgtcggaagttaatattggcgagtctgtgaaggtgcaggtgacggtgaaaaatacgggaaaacgtgccggtaaggaagtggttcagctatacgtgggagatccggagagtagcctcgtccgtccacctaaagaactgaaagggtttgcgaaagtggaactgcagccgggtgaatccaaaactgtaagcttcgagttagatgaacgggcgttcgcgttttacgatccgtatcagagtcgatgggtcgtagaaccgggcgagttccagattctggttggcagcagcagccaggacattcgtgcgtcggctgttctgcgtatggcatga

SEQ ID NO: 609 - DNA, 1440 bp, Artificial Sequence
  6xHis UPI0002050DA2
atgcaccaccatcaccaccacgagaatctttattttcagggttctatgaacgcccgttccccttttttttggggttcggccacggcctcgtaccagtgcgaaggcgcatggaatgaagcgggcaaagccgaaagtttgtgggaccgttatttgcatgaggcacatctggaaaacggcgatgtggcatcagaccattatcatcgttaccgtgaagatatcgaactgatggcgaaagggaatcagaacgcctatcgctttagcctgtcatggccacgtattatcctgaatcgtgaaggtgatgttaacgaggcgggcgtcgaattttattcccgcgttgttgatgcatgtctggaattcgggatcgaaccgtatgttaccctgtatcactgggatctgccgcagtactggcaggacgaaggcggctggcttaacccggcagtcgccgacgcctatgttcgcttcgcaagggtgtgttttgatcgtcttggcgatcgcgttcgttattgggcgacgtttaatgaacctaaatggtttgtggcgagcggatatctgattggtaactatcctccgggactgaatgatccgcagctcgcgatccgtgcagcatttaatgtaatgtatgcaagcgcgtgttgtgtgcaggtgtttcgtgatggacgtttccagggggaaatcggtatcgttcactccttcagcccagtagatggcatcgatgagactttagagacgcggattgcgatgcgttatgcggataattactgcaacaattggattatggataccgcagccaagggtgaaattccgattgatttattggcggatctgaacaaacgctacgatctgtcttttatgagtagcaggcagctggacgtgattgccgataacaccgttgactttctgggtctgaactattatagccgcaccttagtgaaaccttacacccgaggcgaaaccagcattgtggtgaataataccggtgccagctttaaagaaaaacctcgcgtggttctgaaggattggttcgaacaggtactcgatgacccagggatggaggtcacagcgtggggtacggaaatttacccggatggtcttcgtcgcggcctgctggatgtctacaatcgttatcatctgcccatttatgtcaccgagaacggcatcggagtggtcgaagaaattaacgcggaaccgatcgacgatgaataccgtatctcattcatgcgttcccatattgaagcgattaaggcggccatgcacgaaggtgccgacgtccgtggttattttgcgtggagctcctttgatctgtatagttggaaaaacggctgcgagaagcgctatggtttaatcggcgtggatttcgatcgtgatttacggcgtatacccaagaagagcttcggttggtatcgcgattttatcgcccgcgaaagtaccgccgaaaagtga

SEQ ID NO: 610 - DNA, 2277 bp, Artificial Sequence
  6xHis UPI000210C886
atgcatcatcatcaccatcatgaaaacttatactttcagggcagtatgcctgtggggggaagaacgtttgagagctacggtgaagatcctctcttagcaggcgctatcggcgtggaaatggtgcgtggggtacaggctcagggcgtccaagcttgcgcgaaacactatgctattaacaatcaggaagatcatcgcagctcagtagacgccgttattgatgagcggaccatgcgcgagctttacctgccgccctttgaagccctgatctcggaagcagaagtagcaagcatgatgggatcttttaaccgcgttaatggcgcctttgcgtgtgagaatccgactctgctgaccgacctcctgcgtaatacgtttggctttcagggctggatcatgagcgactatggcgcaaatcattcaactgcggatgcagcaaatgcgggccttgatcaggagcagccgaatgaaggtttttgggggagcaaactgttagaagccgttcgtaacggggaagtggccgaaagcgtaattgatgacaaagtgcgtcgtatcctgcgacctttaatcggcatgggccaactggagaacccggttgggattgcggagttcgcagtggatgaccaccacgaagttgcccgtcgtgttgcggaagcaggtaccgtcctgttacgcaacgatggtttgctgccgctgggggaagtacgttccgtcgcgctgatcggccctgatgtcgacggcgttggcgcacaaggaggcggtagttctatggttcgtgccacgaagggtacaagcccccttgacggcctggcagctgcactaggcgaggatgtggaaatcactgttgcgtatggcagtgaccctgttacgcccggggcactccttcctggtcctgatgccatccccagtagtttttttcgtaccccggaaggggaacgcggcctgcgcgcggaattttggaccaacccagatttcggcggtgatccttttctggttcgcaatgatggacaagtggaactcaatatggggtttcataattttcccggctttaatgcagctagcccgcgatatgataaactgccgggcgatctgaatgcacagatttcagcacgttggacaggatcgttagttgttccgaccacgggtacatatcagtttgctattaccagccttgggtcatatgcgttttcaattgatggcaaagcagtctcgtcatcgggtaatctcgccgtggcgactgaagtcgaagcggcggagcctgctgaaccaaagccttacggttggggcggcgatgcggccgagaaccctaccgtggaagagctgacacttgaacttgaagctggtaaagaatatccgatccgtttagattatgcggccaatcacccgagccagggtttcctgcttggcgcccgtttccgtctcggctgggtgccgccagcgggagtctattctccggaagttaccgaggctgcggaactggctgccaagagtgatgttgctgtcgtcgttgtccgtacctatgaagcggaggccgacgatcgccctcacatgggcttaccgtcaggtcaggacgatctaataaaagctgtcctggccgccaatccacgaaccgtagtggttctcatgactggggccccggtggatgtgacccgttggggtcaagaacctgctgccttactgcaagcctggttcccaggccaagcccaaggtgaagcgcttgcccgtgtattaactggggaggtggaacccggcggtcgcctgccgcttacgatcccggcgagtctggctgataccccggccgcggatcctcgtacttaccctggtgtggatggccaagtgcactataccgagggagtttttgttggctatcgtgcggtcacggcggatggtccggcgccgtcatacccgtttggtcatggccttggctacactagctttgattttagcgatctggcggttgaagccgccgacggtgacgatgttgccacggtgtccgtatctgttaccaatacgggtggccgtgaagggagtgaagtagtccaagtttacgtgggcgaactgccagcaccagtcccgacccccgcacgccagcttgcagcattcgcgaaagttaaattggcccctggcgagtcagaacgcgtgagcctaagcgtgccgcgccgtaaagtttcctacttcgatgttgagacccatgattgggcaaccccggcgggcgaagtagaaattggggtgggagcctcgtctgccgatattcgtcttactggtgcgattcaggtcgcgtga

SEQ ID NO: 611 - protein, 2337 aa, Artificial Sequence
  6xHis UPI0001C18877
ATGCACCACCATCACCATCATGAAAACCTGTACTTTCAGGGCTCAATGGGTCTGAAGCCTCCGTACTTAGACCCAGCACTGCCGGTGGCAGAACGTGTTGCTGATCTACTGGGCCGCATGACCTTGCCCGAGAAAGTAGGCCAAATGCTGCAGTTAAACGCGAAAGAAGGTGTGCGTCATCTGGTGGAGGATCTGCATGCCGGTTCGATCCTACACGCCAGCCCAGAACGCGTTAGCCAGGCGGCGGAATTGACCGCTCGCACACGTCTCCGCATACCTCTCCTGGTTGCGGAGGACTGTATACATGGCCATAGTTTTTGGGAAGGCGCGACCATTTATCCGACCCAACTGGGTATGGCAGCCACCTGGGACCCGGAATTAGTGGAACGAATTGCACGCGCGACGGCCGTTGAAGTAGCAGCAACAGGCGTCCACTGGACCTTTTCGCCGGTGCTGTGTATTACCCGCGATCTGCGTTGGGGACGCGTGTCGGAAACTTTTGGTGAAGATCCTTTCCTGATTGGCGAACTGGCTTCTGCTATGGTGCGTGGATACCAGGGCGAAGGTCTGGATGATCCAACGGCGATACTGGCGTGCGCCAAACACTTTGCAGGTTATTCTGAAACCCAAGGTGGCCGTGATGCGTCCGAGGCCGATATTTCTCGTCGTAAACTGCGTTCCTGGTTCCTTCCGCCCTTTGAACGAGTTGCCAAAGAAGGTTGTCGTACCTTTATGCTGGGCTACCAGAGCATGGATGGTGTGCCGATTACCGTAAACAACTGGCTGCTGAATGAAGTCCTGCGTGGAGAATGGGGATACACCGGCACCCTTGTGACGGATTGGGATAATGTGGGACGCATGGTGTGGGAACAAAAGGTGTACGCGGACTATGCACAGGCCTCAGCCGCCGCCGTGCGTGCGGGAAATGATATGGTTATGACCACCAGTAATTTCTTCGCTGGAGCGCAGGAAGCGGTTGCACAAGGTGCCTTGACCGAAGCAGAAATTGACGCAGCGGTACGTCGCATTTTAACTCTGAAATTTGAACTGGGTTTATTCGAAGACCCCCGACATCCGGACGCAGCGCGTCAAGCAGAGGTTATTGGTAGTGGCGCACATGCCGCGCTTAATTTAGAAGCCGCCAGACGTTCACTGGTACTGCTGACCAATGATGGAACCCTTCCGTTTGCGGGTGGTCTAGTTGCCGATGAAGCCGGCCGTGGTAGACCTCTGGCTTCCGGTAGCCCGCGCACTGTAGCTGTTGTTGGGCCTAATGCAGACGATGCGCAGACTCAGTTAGGTGATTGGGCAGGTTCCTCAGGTCAGGCAGATTGGCTGCCGGAGGGCCAACCTCGCGGAATGATTCGTACAGTGTTAGATGGCTTTCGCGATCATGTCCCTGCCGACTGGACAGTGGCGTATGCCCCTGGTGCACGTATCCTGGATGTTGGTCCCGATCCAGAAGGAGCTTTTTTCCCGGATGGTCAGCCTCGCCCGGAAGTGGTCGTTCCGGCGGCTCCGGATCCAAGATTAATCGCAGAGGCGGTCGCGGCAGCTGAAGCTGCGGACCATGTAGTTGCGGTGGTTGGTGACCGCATTGAACTGATCGGAGAAGGTAAAAGTACCGCCACACTCGAACTGGTAGGCGATCAGGTCGCGCTACTGGATGCGCTGGCGGCGACGGGCAAGCCGTTTGCCGTAGTCGTTATTAGCAGCAAGCCGCTGGTTTTACCGCCCTCAGCTCTGGATGCAGCGGCGATTGTTTATGCGGCAAATCCAGGGATGCTTGGTGGTCGAGCCGTCGCAGAACTGCTTCTAGGCCTGATAGAACCGACGGGGCGCCTGCCCCTGTCATTTGCACGCCATGCAGGACAGCAGCCGACCTATTACAATCAGGTTCGTGGCCAACACGGTTCCCGCTATGCAGATTTAACGCAGCGTCCTGCCTTTGCGTTTGGCGAGGGCCTGGGCTACACTACAGTGGATTATACCGATCTGGAGGTACTGACCAGCGTTGTGGATGAATCAGAGACCGTGCGAGCCCGCGTTACGGTAGCAAATACGGGGGCGCGTCCGGCGTTGGAAACAGTTCAGGTTTATGTCAGCGACACGGTCACCTCTGTTACCTGGGCGGAGAAAGAGCTGAAGGCTTATCGTCAGGTTGCCTTGGCGCCGGGCGAGAGCCGCGAAATATTAGTAGAGCTCCCCGCTGCCGATTGTACCCTAGTAGATGCCGAAGGCCGTCGTGTGGTGGAACCGGGTCGATTTGAATTAATGGTCGGTCCAAGCTCGCGCGATGAAGTGCTGCTTAGAGGCGAGTTTACTGTGAAAGGGTGA

SEQ ID NO: 612 - DNA, 2490 bp, Artificial Sequence
  6xHis UPI0002282B61
atgcaccaccatcatcatcacgaaaacttgtatttccagggcagcatgagtatcaccgaaaaagttaatctgacgacaggtactggctggggcagcggtccttgcgttggcaacactggcagtatcccgcgcctgggggtgcctaatctgtgcctgcaagatggaccaaatggagtgcgctttaccgatttcgttacgcatttccccagcggcttagcggcagccgcgacctttaataagggcctgatgtacctgcgcggtaaagccattggaaaagaacacaaaaaaaaaggtgtgcatattgcactgggtccgactatcggccctatgggtttgaaagcagcgggtggtcgtaattgggaaagcttcggcgcggatccgtacctgcaaggcgtaggcggtgcagcgacagtggagggtatgcaagacgagggtgtcctggcgaccgcccgtcatttcattgggaacgagcaggagcactttcgtcaagtgggcgaatgggaagaaaacggctgggacaaactggaatcagcgattagcagcaacattggtgatcgtgcgatgcacgaggtttacttatggccctttgcagatgtggttcgcgcgggcgtggcctcggtaatgtgctcgtacaaccaggttaataacacctacgcgtgcgaaaacagttacctattgaactttctgctgaaagaggaattgtccttccagggtttcgttgttagcgattggggagcccagcactcgggcgtcaatagtgtgcttgccggcttagatatgacgatgccgggcgaagtgtttgatgattggctcaccggtaaaagttactggggcgcgctgctgacccggagtgtgtataatggcaccatttcacagaaacgcttaaacgatatggtgacgcgaattctcgctccatttttcgcgatcgaaagcgtggctctaccgaccgaggaggacgtacccaattttagcagctggacccatcatacctacggccaggaattcccgtatcagcattttggcccgatcgtgcagaaaaactggcatgtcgatgcgcgttcagagttctcagataacaccgcgctgaccgtggcgcgcgaagcaatcgtgctcttaaaaaatagcggccatcatctgccaattgacaaaggatcaggtatccgccgtattctcgtcgcgggcaaaggagcgggaccggatcctaacggctttaactgtcgtgatcaacgttgtgtggatggtgtgttgaccagtggctggggtagcgcagctgttaacaatcccttcgtaattacaccttatgaagcgattgcacagaaagcccgtgaccgcggcattatgattgattactcgtcttccgtgtgggacttagataacgtagaagatctggcggattatgcagaccttgccattgtcgttgtgaacacgttttctggtgaaggctacgtgtatgtggaggataatttcggtgaccggcagaacctgagcttatggcataatggcgaccagctgatcgaaaccattgccgataaatgtaaaaaaactgttgtggtagtgactagcaccggtccagtatcaatggagaaatggatcgaacataaaaacgtggtggccgttatctttgccccgcccctgggccaatttgttggccaggcgatcgcagacgtactttttggcgacaccaatccctctggcaagctaccttttactctggcgcgtaaaaaacagcattacgtgccgatcattgatgacttaggcggagacaggaatccgcaggataactttgatcgtgatatctacttggattaccgtttctttgacaaacataacattaaaccgcgctttgagtttggatttggcctgagctatacttctttcaaagtatgcaacctaaagatcacggagatcaaccctccgagtgagtatctcccctaccctcaggaatacttgcccatttataaactggtcgaagatgatgtatgcgatcctgaagacgctctgttcccgcacgatgagatggatcctgcccccggatatatctatccatacctgtataacgagaacgttcgctcgctcgatgatcaggatgattatgagtacccgcgcggctatgatccggaccagccgactgcgccggttctggcagggggaggtctaggtggtaatccggccttgtgggaagtactgtatgaagtttgcgccgaggtaaccaacgaaggtaagttgaaaggtggctatgtaagccagctttatatcgagttcccgagtaccattttgccaagcccgccacgtgtgctgcgcggcttcgaaaaggtttttctagaaccgggcaagtctgcgaaagtctactttaacattctgcatcgcgatcttagtatttgggacccggaatcccagcagtggattattcagacgggcacttacaaaatttacctgagcagcagcagccgtaaagtagaactgtgtggtgaaattgacattggctgttga

SEQ ID NO: 613 - DNA, 2199 bp, Artificial Sequence
  6xHis UPI0002402F4A
atgcaccatcatcaccaccatgaaaacttatattttcagggtagcatgactggtaccgttgacgtggaagatgtcttgtcaaaactcaacaacgttgagaagcgtcttggcattccggccattcgcatgagcgatgggccgaatggagtgcgcgggacgaaattttttaatggcgtaaaagcagcctgctttccgtgtggcaccggtctgggggcaacctgggatgtggatctgctgcgtcaggccggtcagctgatgggcgatgaaagcaaaagcaaaggctcacatattattcttggcccgactatcaacatgcagcgcagccccctgggtggccgtggcttcgaaagcttaagtgaagatccggtattggcgggacttggtgcagcggcattgaccgcctataataaggtcaacggcattcacgtgtcggaaaacgataagatccttaaaggtattctgcgcggtgaatggggctgggaggggatggttatgtcggattggtggggcacctactcaaccagtgaagccattaacgcaggtcttgatcttgagatggcgggtcctacccgatggcgtggaatggcgctccagcaggcagtgtcagtcggtaaagttcaccagcatgtgctagacgagcgcgttcgtaatgtgctgaatttgattaaccgcgtgtcggcggccaaaattgaagaatatgcgccggagctgacggctgatacgccggaaaccgcagctttcctgcgcaaaattggcggggaatcgattgtgctaatgaaaaacgaagataaaattcttcctctcagcaaagataagaagaccctgattctgggcccgaatgctaaatatgcagcgatacatggcggtggcagtgcggccctagcagcgtattatgcggtgacgccgttcgaaggtattaagtcacagttaacaagcgatcccctgtataccgtgggctgctacagccacaaagaacttccactgatcggcgatattctgaaaacggcgaacggcgagactggtatcagcttcaaggcctacaacgaagcccctaatgtacccgaccgcgaaatagcggatgaattagtgctgaccaaaaccgaattgctcatgatggactacaactgtagcaaactgaaatctgatttgtggtacggaacgattgaaggtacttacaccgccgaagaggattgcgatttcgaattctctttgggcgtatacggcgcagcgaaattgtttgtggatgacaaactgctgattgataatgataccgtccagcgtaaggggaccatgttctttaattgcggtacggccgaggaaaagggcactataccggtgaagaaaggccaagcctaccagattcgtgtggagttctcgtcagcacctacctctaaactggatcccggctcaaacaccttattcggttccggcgctgtgcgtatcggtggtgctaaagttattgacgccgaggaggaaatcaaacatgcggcagcgctggctaaaaataccgatcaagtgattatttgtgctggcctgaattccgattgggagtcggaaggcaatgatcgagataatatggcattaccgggttatatggacgctctcatcacagccgttaccgccgcaaacccgagcactgtcgtagttatgcaatctggcaccccggtagaaatgccgtggattagcagcacgaaagcaatgattcatgcctggtatggtggcaatgaaaccggcaatgcgattgccgacgtgctgtttggtaaggttaatccgagtgcgaagcttccgctgagttttcccaaacgtctgcaggataatcccgccttcctaagctataaaacggaacgcgggcgtgttctgtacaatgccagcctgaaagtttcggttaaagtgtctaacacgggcgaccttcccggtgcggaagtcattcaagtttacgtgtcgcaaaaaaatccgtccatcaagcgacccaagaaagaactgaaaggttttaaaaaggtctatctcgaaaaaggcgaatccaccacggttgaagtggaaattgaaacaaaatacgcgaccagcttctgggatgaagttcgcgatagctggatcattgaaaaagatacctatgatgtgctcgttggcagtacctcagaaaaaatacaagtcaaaggcgagttcgaagttggcaagaccagttggtggaaaggcctttga

SEQ ID NO: 614 - DNA, 2592 bp, Artificial Sequence
  6xHis UPI0002633B36
atgcatcatcatcaccaccacgagaatttgtattttcaaggaagcatgactaccccgcttcgtcaagatctgcgccgccgccgtccacgtatcgccctttcaccatctcctagttacccggattctactcctcctagcccgaggtcatggggtatccgcactcacctgatggcaccactgctgcctgcactggtcgtgttatacttggccgtatccacgacctcaacgtctctgcggacgcgcagcgttcaagatggcgtaccagatggcgctccaccgggctttgaacagtatattagtccgataattgtgccgtctccgaacataagcggctcaggcggttgggccccggcattaaaaaaagcccgccacttcgtcgaccaactgaccttaccggaactagtcaacctgaccactggcgcgggtattctgaaccgttgtgtgggcaatactggaactgtggagcgtttaggcttcgaaggtatttgcttagaagattcaccactgggcgtacgcttcgcagatttcgtctccgcattcagcgcgggaattaacgcagcggcaacttgggataagaatcttattagacgtcgtggcgtggcgatgggtaaagagtttcgtggcaagggcgtaaatgtcgctcttgggccgatgatgaatatgggtcgtgcgccggcggctggtcgcaattgggaaggctttggtgccgacccctacttgaccggcgttgcctcggtggaaaccattgaaggcacgcagtcgcagggcgtcatcgcatgcgcgaaacactggattggcaatgaacaggaacattttagaggcggttctggcagtcagacatctagtagcaacattaatgaccgtactatgcatgaaatctacatgtggccatttgcggaatccgtgcgcgcgggcgtcggcagtgtcatgtgctcttataatcgcctgaatcagacccatgcgtgcgaaaactcaatgatcaacaacgggctcctgaaagaagaactggattttcagggttttgtcgtttcagattgggcggcaattgtcagcggtgtttctaccgcgttggggggtaccgacatgaacatgccgggtttttacgcttatactaacctggaagatagccaatcaaatccggcggtgagtaacacctcatattggggcgcggcattagtagaagcggttaataacggctctgtgccgttaacccgcgtgcaggacatggtcatgcgcacaatggcggcctattataaactcggtcaggataaggatttcccggccgtgaacttccatcaactaacgcaggatacctacttaaatggtgagctggtaaacgaacatgtaaacgtgcagcgtgaccaccgcaagctgattcgtgaaatgggagcggcatctactgtgctgttgaagaatgaacgcaagacgcttccgcttgatgcggccagctttgctcgctggggcttctttggctccgatgccggccccggggagaatggcccgaacggttgtttggatcgtgcctgctcggaaggtacgttagcaatgggctggggatcaggcaccgcgaactttccgtacttagtggatccgtactctgcgttacagacctttattcatagcgttaaaaataacgcggtcatcgaagcagtcctgaatgattattcacctcaggtcgccacaatcgcaagcctggcggacatttgcttggtgttcgcaaactctaacagcggcgagggtttcgctactgtcgacgagaacgcaggggatcgtaacaatttaactctttggcactctggcgacgacctgattgccaacgtgagtagccgttgtagtaatacggtggtgatactgcacaccgttggacccgtgattgttgaaagttggattgaccatccgaatgtgaccgcggtactgtacgcgggcttaccgggccaggagtccggcaacagcatcgtggatgttttatttggcggtgtgaacccatcagcgcggctcccctatacgatttcaaaagcgcgtgaggattaccctgccgatattctgtacacagcgccgagcgatgtggtgcctcagctgtcatattccgaagaattactcctggactatcgttggttcgacgcaaaaagcatcgcgcctcgtttcgaattcggcttcggcctgtcgtatacgtcatttgattacactaaactgtccattaaacctagcggatttcatcgtcgtagcaaacaggtgtgggaaaactggaacgatgaatcaaacgcgccgggcggtccgcctggcctgtgggaagatgtggtacaggtggaatttaccgttcgcaacacgggcggagtggatggaaatgaagtgagtcaagtgtatttaggttttccggaaggcgcgggggaaccgccgaaggtgctgcgtggtttcgagcgcacttttctgaagaaaggggccaaaaccaccgtcgttgtaaaacttaaccgcaaagcgctgagcatctgggatgttgttaaacaggcctgggccgtgcccaagggtgactttaaagtttttgtgggccagtcttctcgcaaaattgtgttaacgggcagctttcagcagtga

SEQ ID NO: 615 - DNA, 2430 bp, Artificial Sequence
  6xHis UPI00027DFD35
atgcatcatcaccatcaccacgagaacctttatttccagggcagcatggaccaaacgctccctgcaccagcccgcgcaaatttgcttctggccgaactgagcctggatcaaaaaatggcgcaggtttcttgctacttcccgacagatatcgcgcaaacggacgactttgccgatcgcttcccatttggaatcggcgaggtcagttgtttagaggcccgaagcgcgctgaccctcaatgaagtgaccgaattccagcaccgtattcagtctgcggccatgaatggctccggacacggtattccagcgatcttccacatggaaggcctttgtggcgcgtatctgcctggagccacgagtttcccttccggactaggccgcgccgcttcgtgggatgtcgatttagagcttcgtgtgggagagattgttggtcgccaggaacgcgccttaggaatcactcataccctggctccagtcctggacgtgagccgcgatccgcgcatggggcgtcatggcgaatcttatggagaagatccgacgttagcggcagcgctgggcgtatcgtatacactaggcttacaagaccaggatagcgcaggccgtcgtacggaagcggtggcaaaacactttgtcggtagtcatcacaccgagggtggcattcacggcacccattgcaacatcccggaacgtaccttactggaggtatatggaaaaccgttccaggccgccatcacctggggcggccttcgtggtgttatgccatcatataactcggttggtggcgaaccggtgagcgcttcgcatcgtttgctcagcaccctcctgcgtgaagatatgggttttgatgggatggtagtgtcagactattgcgccgtaggcaacttacatacagtccagcgagttgctgaaagttgggcacacgcaggcttagccgccctgagcgccggtatggatgtagaactgcacgttccacagggctttggtcccgaactacgtgattggtttgcggagggccgtgcggatgtcgctttgctggaccgagctgttcatcaggtgcttactgcgaagtttcgtatgggtcttttcgaacatccgttcgcgccggatgcacgcgatcgtgacagctcattccgcgcagaatctgattcggcagtggccctgcagagcgcgagagagtctcttgtgttactgtccaatgatggtgtcctacccctcgcagcggggaccggaaaactagcagtcattggctgtcatgcggccacagcacgttttttctttggcggctacactcattattcgatggcagaaggcatgctggccgttaattcgagtatggcgggacttgcaacgcgtagcgatgatctcaaagcaattgcgaataatttaccgggcactaccattgaagcctccgatggtactgcctttgaagcgctgctgcaacgtcagcagccgggcatccgcagcttattggatgaactgcgcctgcgtatgccggatacagaggtggaatgggccgccggttatccctttgccggagatgatgactccgggcatgacgatgcactggcactggcggctcgtgccgatgtggtgctcttaaccctgggtgggaaacacggcacggcgtcaatcgccagtatgggtgaaggaattgatgctaccaacattaatctgccgagctgccaagaagatctgattgtgaagttgtcgcagcttggcaagccgctgattggcgttcatttggatggccgtccgatatcgagcgatgcttcagataaacacctggacgccttagtggaagcgtggagccccgcggaaggtggtgcccaggctattgtcgatatcttaaccggtgtccactcgccgtcaggccggcttccggtatcgatcgcgcgcaatgcgggccaggtccccgtgtactataatcatccgtacggtagcagctggcatcaaggtgaatccgttggcttcccagaatatgtggatgccccgcatgcgcctcgttacccgttcgggcatgggcttagttataccacgtttgaatatggaggtctgagcttcagcgcccataaagtcggcggcgatggctctattgatttatcgtttaccgtgaccaacacgggtgaacgttatgggactgagatccctcagctgtacatccgcgacacatatggtagcgttagtcgcccggtactggaacttgccgggttccgccgagtcgggctggaaccaggacagaccgcacaggtagactttacgctggatattactcaactggcttttctggatgcaaacatggagtggcgtgttgaggcaggcgatgttgacataatgattggtgcaagctctgaagaccttcggttaacaggcactgttacaattgcaagcgatgcggtgatcgatggtcgcacccgatcattctatgccaaatga

SEQ ID NO: 616 - DNA, 2586 bp, Artificial Sequence
  6xHis UPI00028D698C
atgcaccaccatcaccatcatgaaaacctgtacttccagggttcgatggacgagtcaaacgccccgagtacaccggacacggaattttcaccaccctgctcgccgccgcagaaaattcagtacttgcgcgacacccgtagcgctgcgaaagaaaaactgagccttctgaccttagaagagaaagtgagcctactgaccgccgcggatttctggcgaactaaagcgattccggaaaaaggaattccgtcaattaagactacagacggtccgaatggcgcgcgtgggggcattttcgtcggcggtaccaaagcggccttatttccgtgtggcatctcactggctgcgacgtggaacaaagatctgctgtatcaggtgggtcaacatctggctcaggaagttcgcgcccgctcggcggaaatgttgctggccccaaccgtgtgtatgcatcgccatccactgggtggccgtaattttgaatcattctcagaagaccctctgctgaccgggaaattagcggcgcagtacatcaaaggattgcaggatcggggagtggccgcgactattaagcatttcgtgggcaacgaacaagaaaccaatcgtcttaccattgactcacttatcaccgaacgtcctttacgtgagatttatcttaaaccgtttgagatcgccgttcgggaagcgaatccgtgggccgtcatgagctcttacaacctgattaatggtgttcacgcggacatgaacaaacacaccttgaaagatattctgcgcggcgaatgggggtacgaaggtaccgtggtcagtgactggggcggcgtcaacagtattgtcgattcagtcgaagctggttgcgacattgaatttccgtatagcccgaaatggcgcttagacaagctgattgtggcagtgaatgagggccgtatgtcaattgaaaccattaaccaggcggcagaaaacgtactcgcgcttgtggaacgcttaaaagggggtgacatgagcccagaacagccggagcgtgaagatgatcgcgaagagacacgccaattgattcgcgccgcaggtcacgaaggtctgacgctgctgaaaaacgatcatgggatcctcccgctgtgtccgaaatcaaccaaagtagcagtgatcggtccaaacgcgaaccgtcacattgccggcggaggcggctccgcgtccctcaacccgtattataacactattccactggattcgattcgcaaggcgtctcaacagaaagttagtttcgctcagggctgtcacattcacaaatggctgccggtcgcaagcgaatattgtaccgaaaaaagtggtaaaccgggcgttcacattgactggttcgccggtgacaagtttgaagggagtcctgttgtgaaacagcgtcgtaccaacacggatttatttttatgggatagcgcaccgctgaatcaagttggcccggagtggtctgccgtggcgaccacttacttaaccccgaaaacaacaggcaaacataccattagcttcatgagcgtcggccctggtcgtttattcgtggatggcaacaaagttttagatctatgggactggactgaagaaggcgaagccatgtttgatggttccatagattatttggtagacgtggatatggaagcagataaagcggtggaacttcgagttgagatgaccaacgaactgcgccccattagcaaacagaaacagtttgggattacgcacaaatatggcggctgtcgcatcggctttaaagaacaagaccgcgttgattatatccagcaggccgtggagaccgctcgcgacgccgatgttgcagttgttatcgtaggggtcgatgctgaatgggaaagtgaaggctacgatcgacaaactatggacttaccggcggatggtaaccaggatcgtctgattgaagcaattgtgaaggccaacccacgtaccgtagtcgttaatcagtctggcagccctgtgcatatgccttgggtcgatcgcgtgccagtcattctgcaaggttggtatcaaggccaggaagccgggaatgccttagcagatgtgctgttcggtatcgaaaatccgagcggcaaactgccgagcacctttccgaaacgcattgaacacactccggcgtggcacacctggccgggtgaaaaccacaaagtgctttatggcgagggtctgtatatcggctataagcactacgaccatgcgaaaattgaacccctgttcccatttggtcatggcttaagctataccaccttcgaatacggccgcccggagattagcacgcgcacactcacgccgaacgaggaaattacgattacactggcaatcagcaatacaggatcacgcgcgggctcggaaattgtgcagctgtatgtgcacgatgagaaaagtcgccttccgcgcccagagaaagaactggtagcgttcgaaaaagtttacctggaagcggacgaaacgcgccatatcagcattaagcttgataaatatgccgttggatactacgatgaaactgtgccgggctggattgcggaagaaggggtgtttcaggtgctgatcggcgcgagcagtacagatattcgttga

SEQ ID NO: 617 - DNA, 2280 bp, Artificial Sequence
  6xHis UPI000006AA61
atgcaccaccaccaccatcatgagaatttgtactttcaaggcagtatgcgctaccgtactgctgccgcgctggcattggctaccggcccctttgctcgtgccgattcccattccactagcggtgcctctgctgaagccgtagtcccaccagcgggaacaccatggggcacagcatacgacaaggctaaggcggcgttggccaagctgaacctgcaggacaaagtcggcattgttagtggcgttggatggaacggcggtccttgcgtcgggaatacctcacctgcgtccaagatctcgtacccctcgctctgcctgcaagatgggcccttaggtgtccgttattccactggtagcaccgccttcactcccggcgtccaggcagccagtacatgggatgtcaatctgatccgcgagcgtggacaattcattggtgaagaggttaaggcaagcggtattcatgtcatcttaggccctgtagccggcccgttaggtaagactccacaaggcggtcgcaactgggaaggcttcggtgttgacccctatcttactggtattgccatgggacagacaatcaatgggatccaaagcgtgggtgttcaggcgacggcaaagcattatatcttaaatgagcaagagctgaaccgtgaaaccatttcctcgaaccccgatgatcgcacccttcacgagctgtacacgtggcccttcgcagacgcagtacaggcgaacgtagcatcagtgatgtgcagctataataaagtcaatactacgtgggcttgtgaggaccaatatactcttcagaccgtgctgaaggaccaactcggatttccgggttatgtcatgaccgactggaacgcacaacataccacggtgcaatcagctaactcggggctggacatgagcatgcctggaacagactttaatggtaacaatcgtctttggggcccagccttgacgaacgccgtcaactctaaccaggtacctactagtcgcgtagacgatatggttactcgcatcctcgcggcttggtacctcaccggtcaagatcaagccgggtacccttccttcaacatcagccgtaatgtgcaagggaatcacaagacaaatgttcgcgcaatcgcgcgcgacggaattgtcttattgaagaacgacgccaatatcctgccgctgaagaaacccgcatccattgccgtcgtgggatcagcagctattatcggtaatcacgcgcgtaattcaccctcatgtaatgataaggggtgtgacgacggtgccttaggcatgggctggggatcaggggcagtaaactatccatacttcgttgccccttacgacgcgatcaatacccgtgcgagttcccaagggacgcaagtcactctgtctaacactgataacactagttcaggggcctcagcagctcgtggtaaggacgtagccatcgtgtttatcacagcggactcaggggaagggtatatcactgttgagggtaacgcaggcgaccgcaataaccttgacccgtggcataacggaaacgcgcttgtacaagcggttgccggcgccaattccaacgtgatcgtcgttgttcacagcgtgggagcgatcatcctcgagcagatcttggcgctgcctcaagttaaggctgtggtgtgggcggggttaccgagccaagaaagcgggaacgcattagtggacgtcctgtggggcgacgtgagccctagcggcaagctggtttacaccatcgccaagtcgcccaatgactacaacacacgtattgtttctggcggtagcgacagctttagcgagggtctcttcatcgattataaacactttgacgacgcaaatatcacgccacgctatgagttcggttatggactgtcgtacactaagtttaattattctcgtctctccgttttatccacagccaagagtggaccagccacgggtgccgtcgtccctggtggtcctagcgacctgttccagaatgtggcaacagtgacggttgacatcgcgaacagcgggcaagtaactggtgccgaggtggcccaactgtacatcacgtatccttcgagcgctccacgcaccccgcccaagcaactccgcgggttcgctaagttaaacttaacccctgggcagagcggcaccgccacgttcaatatccgccgccgtgaccttagttactgggatactgcgtcgcaaaagtgggtcgtgccgagtgggtctttcggtatctcagtaggcgcgagttcacgcgacatccgtttgacttcaaccctctctgtagcctaa

SEQ ID NO: 618 - DNA, 2409 bp, Artificial Sequence
  6xHis UPI0001CDA964
atgcaccatcaccaccaccatgaaaatctctatttccaagggagcatggagataaaatatctgtatcaagacgaaaagcagacgccggaaaatcgtgcccaagatttaattgcccgtatgaacttggaagaaaagattaaccagctgtcaggcgagattgtgatggaccagattccggaaggaacactgggtcatggtattggtgaactggtcgtgtacgcatccaaaggttcaatggaagagaccgcggaattcataaacacgatccagaagaaaattatcaacaactcgcgttggggtattcctgtgattgtacatgccgaagccctctgcggaggcgtggttgcaggtatgacccaatatccgtccccgattggtctgggagcctcatttatgccagagttggttgagaaaatggcggaaaatattaaaaatgagatgcgcaacgttggcattagacaagtcctgagtccggtactggatctagcgcgcgactttcgctggggccgcaccaacgaaacttatggcaacgatccgaccctggtaagcgcctttgggtgtgcccacgtacaaggtatgcagacgaacgatctgcggaaaggcgtgattgccacctgcaagcatttcttgggttacagctccccggagggtgggatcaacactgcgcgtacccagactgacaacggcgatttacgggagaactttgcgaaaccgttcgaggcagctatccgtaaagcgggcttaaagagcattatgaacagctatagtgaatacgatggtgaaacaatttgcgcgagcaaacatatcctgaccgatttgttacgtgacgacctgggcttcgatggcgccgtggtgagcgattattcatctctgattcgtattaaagacaactcacgtatggccgaggattaccagcaagcgggtatcttagcgttgaaggctggcattgatgtcgaactgcctaaagcagtgtgctatgggagcaaccttttacaggccgtgaaagaaggaaaaattgaagaaaaatacgtgaacaccgcggtaaaacgcgttctgaagttgaaatttgagttgggcctgttcgagaagccatattgtgaatacaaggagctggactgcctgaagtgttaccaactgagcgaaaagatgaccgaaaaatctatcactttgaccaagaatgatggcatcctgcccctgacggatcgtaaaattaaggtcgccgtgataggacccactggtgacaacctgcgtatgttatctggctgctatagcgtggcaggctccatcgatatgatttttagcggtatgtcccaggaaggagtggataacgaaacggccgtgaccgtccctgataaatataagaagatgtcgccagaaatcagtgcgaagattgatcggattattcggcagatctacccgatgtccaaaacaatctatgaggcgattaaggaatattacccagaaactgaatacgtggaaggttgcgatattggcgacaacatttactatgacaaagaaaaagcggttgccgccgcgaaaaaagccgacattgttattctaaccctcggcggcaaaaatggctggggcagcaattgcactgatggcgaaggcttggataacacgtcaattgggctgccgggacgtcaggaaaaactgatgcgtgaagtatacaatgtgaatcgcaatgtcattatcatccatacggataacaagccgctggtaaacacgttcgcgtacgaccatatcccggccattatcgagggctggctaccagggatctacggaggcgaagtgctagctaaatgtgtggctggaatcattaatccgggcggcaagctgagcgtggatatccctcgctcgacgggccaaactcctgtgtactactaccaacagaatggttcacgctcggacagcccgatgtatgggctgaataagcacggctacctgaacgagtcatgttgtagcgtccgtccgttcggatatggcaagagctataccagtttcacctataagtgtcaaaatatgaacgtagatgaagaattaggactgccgctgctaactttcgaagtagaagtgagcaacatcggcgaaatggaaggggatgaaaccatccagctttatggtatcgatgaatatgcttctattattcgcccgcaaaagatacttctgggctttaaacgcgtgaccctgtgtcccggagaaacgaagaagatcatcatttcattccgcttagatcaaatggctttccccgataagtgtggcaactggattctggaacgtggacgtttcatcttcgaaatcggctattccagtcgtgatattattgatacctacgagtacacccttgaaagcagcatcgacattgatcatactaaacgtccgttttttgcagaagcttatgtcatttga

SEQ ID NO: 619 - DNA, 2475 bp, Artificial Sequence
  6xHis UPI0001E17370
atgcatcaccatcatcatcatgaaaatctgtattttcaaggctcaatggagctggaagagctgagtgtggttgaaaaggccgctatgctgtccggcggctcagaatgggattcgcgtggcaacagtcgcgccggcattccttcatttgtaatgtctgatggtccacatggagttcgccgtcaactcggtgagggggatcatctgggtattggcgcctccaaaccagcgacgtgtttcccaactgcgggtactgtagctaatagctgggatccggccttagccgaagaaatgggcgaagctcttggaaaggaagcacatgatctggatgtaaacgtgctgctgggaccgggcatgaacattaagcgtaaccctctttgtggtcgtaactttgagtactattcggaggatccggtcgttgccggccgcatggctgcaggccttattcgtggcattcagagcaacggagtttcagcgtgtccaaaacactttgcagtgaacagtcaggaattgcgccgtcaggccagcaattcggtgatagacgagcgcaccatgcgagaattgtacctgaccgggtttgaaatcgcggtgcgtgaggcgggcccgatgaccattatgactagctacaacgagattaacggcatctatgcgcacgaaaacaaacatttgctgcaggaaatcttgcgcgacgagtggggctttgatggcatggttgtgagcgattggggcggcagcaactcagcagtagcggcggttaaagcagggggtagcctggaaatgccatcgccgggttttaccagtgtgcgtgaattagagggcgctgtgcgcgccggtacacttagcgaggcggatctgaacgcacgcgccgcagaagtggcgaagattgcagtggccaccaaactcgtcggtgttggtcgcgatgatttacttaaggacgacattgccgcagcccaccacgaagttgcgaggaaggttgccgaaaacgcgagcgtgttactgaaaaatgataatgctgcgctaccgtttaaaccgggcactcgtgtagccgtcattggggatatggcggccaccgcacgttaccagggctcgggtagttccaaagttaacgcgacgcgcgaggaaaacattttagaagaagtcaaaaatgctgaagggttacgtctggcagggtatgaacctggctacgaccggcagggcgccattgaccgcggcttgatcgaagatgcgattgcgctggctggcaaagatagcgttgacgttgtcttagcggttattggcctggatgaacgcagtgaatccgagggcctggaccgcagcacgatggcgattccacaggtccaaaacgatctgatcgcagcgttaaaaggcacaggcaaaccgattgtggtggttctggtggcgggtagtccggttgaactgccgtggatggatgatgtcgttgcggtcttatacgtcggcctgtcggggcaggcgggtgctagtgctactgttcgtgccttgacgggtgaagtgaacccgagtggccatctagccgaaacttggccgttagtctatggtgattgcccgagcgcgggttggtacccggcaataggtcgggacgccatttaccgcgaaggcccgttcgtaggatatcgctactacgaaaccgcagatgtcccggttcgcttcccgtttggttatggtctctcgtattccgatttcaccttctcggacctgtccgcagacgataatggtgtcacctttactgttaccaacgattctgatattgcgggtgcgaccgtggcccagctgtatgttcgcggacctcagggcggggttctgcgcccggatcgcgaattaaagggctttgttaaagtgtggctggacgcacatgaatcgaaaaaagtgacgattccgtttgaccgctacacctttcggcattttgatgtagccgcgaacgtttggcgcaccgaatcgggaacatggactctactggtgggggacaacgcggagcatctccctctgagcgtggcgtacgcggttgtgggagacatgggtgttacgccggccaacccggcactgggaggctatctcaccggtcacgtaaaagatgtgacggataccgaaatggccgtgttatttggtcacgaagtaatcgccccgggcaagcctatgacgtttggagttaatgacccgattatgtcatgggcaggttcgaaaggctttgttgcgcgtacgatcgctaaaaccttgaccaagcaagaagctaaaattcgccagaagaccggttcccccgatttgaacaccctttttgttctaaatatgccaccgcgtgcgatgagcaaaatgactcagggccgtatagattctgcgatggtagacgcgattgttaaaattgcgaatgggcataccttccgcggattaggcggcgtgattgccggttattttcgcaatcagtcagcgaacaaacgcacagcgaaagaactcaacaacgattga

SEQ ID NO: 620 - DNA, 2268 bp, Artificial Sequence
  6xHis UPI0001FC71F6
atgcaccaccatcatcaccatgaaaatctctatttccagggcagtatgaagacattcatctttaatctgtgcattggcacagccctgagcatctgcacgacctatggtcaaaccgcggaaactaccccgatctatctggacgatagccagcccattgaagcgcgtgtgcaggatgcattaagccgtatgacgattgaagaaaaagtgcgattgtcctatgcccaaggcaagtttacctctcctggctgctcccgtttgggaatcccggaactctggtatacggacggtccgcacggggtccgcgccgaaattaactggaacgactggggatactctggctggactaacgattcgtgtaccgcgtttccggcacttacatgcctagcggcgacttggaatccggagttaagtggcaaatatggaaaagcgattggcgaagaggcccgttatcgagaaaaagacgtgcttcttggcccgggggtaaatatctaccgtactcccctgaacgggcgtaacttcgaatatatgggagaagacccgtatctggcgagcgaaatgtgtgtaccttacatccaggaagtgcagaaaaacggcgtagcggcctgcgtgaaacactacgcccttaataaccaggaactttggcgcaaccatatcaatgttcaggtgagcgatcgcgcgctgtatgaaatttacttgccggcctttaaagcggccgtagaacgtgggggcacatggaccattatgggcgcgtacaataaggtgcgcggaacccacgccactcaccataaactcttaaataacgatatcctcaaaggtgattggaagtttgacggttgtgtcgtcacggattggggtgccgctcacgatacttatgaagcggcgatgtacggtctggatctggagatgggatcgtataccaacggactgacctctgaaagtgcctttggctacgatgattactacctgggcaaaaactatctaaaaatgatcaaggaaggcaaaatcccgatggaagtggtgaatgataaagtggcgcgcattctgcgcttgatttttcgaaccgcgatgaataaaaacaaaccctatggctccatgaccacccaggagcattatcagacagcgtatgatattgcgaccgaaggcacggtactgctaaagaatggcaatcgaaaggagcaggcgggtctattaccgctgcaaagcgacaaatataaacgaattttggttgtaggcgacaacgcgacccgtaatttaatgacgggcggtggcagctctgaactgaagcctaaaaattttatcagcccgttggagggaattcgcgaaaaatttggcaacgtgatttacgcgcagggctacatggctggccgcgacatgttcggccgagtggacgaaatcccgcaatcggttatggatagtctgcgcaatgatgcgattacgaaagcagccgatgccgatctcatcatctacgttggcggtctgaacaaaaatcatcagcaggattgtgaaggtggtgatcgtctttcgtacaaccttccgtttggtcaggatgaacttattcgcagcctggcgaaggttaacaaaaacattgtggttgtgttactctccggaaatgcagtagccatgccgtggctcgacgaagttccgagcgtgattcagggatggtactttggcaccgtgaccggcaaagccctcgccgacgtgctctcgggtgaagttaacccgagtggtaagcttccatttagctacccagttaaactggaagattgtccggcccatgcatttgacgcgctgtgttatccgggcgatagcattaacgagatctatcgtgaagatattctggtgggctatcgctggtatgatacaaaaaagattcgccctatgtttccgttcggccacggcctcagctatacggcgtttgattacagcaaaccgatggcctcggcgaaaaaaatgaagcaagacgaaaccatcaaattcactgtaaaggtaaaaaataccggcaaggtaatgggaaaagaaattattcagctctacatcggcgatgaaaaatgctcggttttgcgaccggtgaaagaactgaaaggtttccaaaaaattactttgcaaccgggggaggaaaaagaagtgactttcactattggctcggatgcgttaaagttcttcgatgagacccagcacaaatggattgctgagccgggcaaattcaaggcctatattggatctagtagcagcgatattcgcggcacggttagcttcgaactgatttga

SEQ ID NO: 621 - DNA, 2415 bp, Artificial Sequence
  6xHis UPI00020E6D19
atgcaccaccatcaccatcacgaaaacttatatttccagggctccatgaaactgaagcgtttactgggcacactgtgcattgtggggatcagcagtattacaatggggcagcagaagaccgtcgatcagaaagtcaatgacctcttatcccgtatgaccttaaaagaaaagataggccagatgaaccagaattcatattttggccttagcgatgcggatattgacaaaatgccggacttggggcttgacgagaacctgcgcaatatcaaagtgagcgaagcacagattgcgaagatgagccgcaaagataaaattcagtatcttaaaaaacaagtgttgagcggtttagatcagagcattctccagccgattagaaaaggtgaagtgggctcactgttgaacgttgttgaccctgaaatggtgaacctgatccagaaaaccgctattaaagagtcgcgcttgggtattccactcttaattgcacgcgatgtgattcacggctataaaaccattttcccgatcccgttaggtcaggccgcctcgtttaatccggaagtggtagaggtaggtgcacaagtggcggcccgcgaagcccgttcagttgggatccattggacatttgcgccgatgatggatatcagtcgtgacgcccgttggggacgcgtggctgaaagcttgggagaagacccttatctggcggcagaactgggtcttgcaatggttaaaggctttcaggacggcgggaacctgaaatctaaccaaagcgtcgccgcgtgcgtcaaacattttgtaggctatggagcggcggagggcggtcgcgattacaacagcactaatattccccccgccctgatgcgtaatgtgtacctggcaccattcgaaaagagcatcaaaggcggagcggccaccctgatgacgtcctttaatgataacgacggcatacccgcctctgcgaacaaatttctgcttaaagatgtcttacgcgatgaatggggcttcaaaggggtggttgtgtcagactgggccagcattgcagaaatgattccgcacggctttgcgaaagacggtgaacaggccgcagagctgtcggcaaacgcccttctagacatcgatatggtttcacatacctaccataatcacctggaaaaactcgttgatgaaggcaaagtttcgatggaaaccatcgatgcgatggtgcgtaacattctgcgccttaaatacgacatgggtttattcgataacccttacattgacacgaaacagaagacgcccttttatgcgccgcagcacctggaagcagcgcagaaagccgccgtggagagcgcaatcctgctgaaaaacgaaggtgtcctgcctctgaacattaataccaaaattgcggtcgttggcccgctggccgacgcgccgcatgaccagatgggcacgtgggtgttcgatggcgaaaaggaacatacggtgacgccgctaaaagccctgcagacaactcataaaaacattgattacgtatatgaagccggtctgaagtatagtcgcgacaccaacacatcacagttcgacgcggtcaaacaggcagtcgaaaaagccgacgttgccgtggtcttcgtgggcgaagaagcgattctttcgggcgaagcccattcgctgtcagatatcaacctgattggcaagcaaagcgatctcatccgtgaagttaaatctgttgggaaaccggtggtagtagtcattatggccggtcggcctctgacaattgagcgcgatttagcctatagcgacgcagttctgtataacttccatccgggcacgatgggcggaccagcaattcttgatttactgtttggcaaagaaaacccgtcgggtaagttaccgatgacgttcgttcgtgaagtcggccaaattccgatgtactataaccataacaacactggacgtcccgcgccggagaaggtaatgaccttagctgacattgaactggaagccgggcagacgagcctgggaaataccagcttctatcttgacagcggcagggatccgttgttcccgttcggtttcggcttgtcgtacagtaccttcgaatattcaaacctgaacttatcagcccagacgctgacgaccaatgacatccttaaagtgaccgtggacctgaaaaatacctcgaattacgccggaactgaagtcgcacagctctatgttcgggacttgttcggatcgattgttcgtccggtgcgcgaacttaaagggttccaacgtgttaccctgcagccgggtgagaccaaatcagttgtgtttgagctgccaatttctgaactggcgttctacggccaggacggaaccaaaaaggtggaatctggtgaattcaaattatgggtgggcaccaactccaatgcggacctggaatcgtcctttcaggtgaaatga

SEQ ID NO: 622 - DNA, 2439 bp, Artificial Sequence
  6xHis UPI00020D4CC6
atgcatcatcaccaccatcacgaaaacctatatttccaaggtagtatgacccccaaggacattctgaacgcacttaccgtggaagaaaaggcacgtttgtgcacgggcaaagatttttggcatctgcacggtatcgagcgtttggaactgccgtctattatggttacagacggaccgcatggcctgcggaaacaatcgggcgaaggcgatcatgtaggtcttaacgccagcgtgaaagccacatgttttccgactgcgtcaggtttagctagcagttggaacccggccctaatcgaaaaaatgggcgtagcactcggtaaagaatgtcgtgccgagaacgtttctgtcttgctgggtccgggtattaacattaaacgaaacccgttagggggccgtaacttcgaatatttctcggaagatccgctgattgcgggcgacatgagcaccgcgtggatcaaaggtgtccagagccaagatgtcggaaccagcttgaaacactacgcggttaacaaccatgaacattgccgcatgaccgtcgatgccgtcgttgatcagcgtaccctgcgtgagatctatttaccggcctttgaaaaagcgatcaagcagagccagccgtggaccgttatgtgtgcgtataataaaatcaacggcacgtacgcagccgaacatcaacagctgctcgacgatattctcgtgaaagagtggggctttgagggcatagtggtgactgattggggcgcgaataatgatcgtgtggagggtatcaaacatggtcagcatcttgaaatgccaagcagcggcgagctgaacacccaaaagatcctggatgcgattgactctggtcgcctgtcgattgctgcacttgataagtcagtactgcgcgtccttgaactgattgtgaaatcacaggcagctctgaacaacgcgcccgttaatgtggatctcgagcgccaccacactttggctagcaaagtagccgaagagtcctgcgtgctacttaaaaatgatcagctgcttccggcacagaaagatcagaacgtcttagtgattggcgccctggcaaacaacacgcgctaccagggggcgggtagctcaaaaattaatcccttcaaattagagcagcctcttgcgcagatcgaagcagtatttggtaccaacaatgtgcgttacagccagggctatcagttgaacgatgagtcggaccaaactatgattgaagatgcggttgcccaagcggaacaggcagacgtgatttttctctttgcgggcttgactcctaaatacgaatctgaaggttttgatcggcaacatttgaacctgccgcaggtacagctggacttaattgatgccctgggcgaccagctgggcaaaactgcggtgatcctgcaaaacggagcccccgtcacgctgcccttcgtcgacaaagtcccggcgattcttgaagcatatctaggcggtcaggcaggcgccagcgccattgctaaaattctggctggcgatgttaatccgagcggcaaactggcagagaccttccccttatcactcgatgacgttcctagccagccctacttcccgggcactactaagcagacccaataccgcgaagccatttgggtaggctatcgttactttgcccataccgcccaacccgtgctgtttccgtttgggcacgggctgacctatagcgaatttagtttttcagagttgcgcattatggatgataaactggacctgaaggccgtgagcttcgatgagcagacgcgaatccgtttacaggttacagtgaccaatacgggtgatcgtgccggagcggaagttgtgcagtgctacctgggccagaacaagccgtcgcaaccgcgtccggcaaaagaacttcgagcgtaccagaaagtcttcttggaagctggtcagagcaaatgcgtcgaacttgaattaaactatcgtgactttgcgttttggtgtgaagcagatagccagtggcgcgtggaaagtgatgattatcacattcagattggagcgagcgtcgaagatatccgtctgaccaccctgatcaccctaaaaaccgatacgccattagccccgcagaatgcgaccttaagtgcctacttcaccccggcggaccgacaatttaatgaccaatcattctcggccctgctcggcaagccaatcccggatgcgaccccgattactccatataccttaaatagcaccctgggtgacatcgcgcaaaccgagcaaggtaaaccgcttttcaatgcgatgctgtcagtgttcagcaaaatgatggagggcgatacaaatgatagcgcggcggaagccgataagctgatggcagaagcgatggtgtcggatatgccgctccgcaacttgcctgtgttcaactcgcagtcgtattccgaagaggccctgttagcattactggcggaccttaatagttga

SEQ ID NO: 623 - DNA, 1770 bp, Artificial Sequence
  6xHis UPI000227E8ED
atgcaccaccatcatcaccacgagaatctgtacttccagggtagtatgttggccccgagcattacgcagtctgtagccaattattatcagcactatatcgcgaatgagcaggaaacgaatcgcaatcctagcggcaatgttcagtcagtttcgagcaatattgatgacagaaccatgcatgaagtttatctgtgtaagatcctgaacggcctcctgaaaaccaaactgggctttcagggtctggtactgagcgattggggtgcacagcatgcaggcgtagcgacagccctagcagggctggatatggcaatgccgaatggtgacgcgctgtgggggagccatctggtcgaagcaattactaatggcagcgtgccggaaagccgcttagacgatatggtaactcgtacaattgcagcgtggtatctgatggggcagaatcgtgggttccctgaacctggcattggcatgccgatcaatttagtacagcctcatcgtgtagtggatgcgcgtaactcctcatttcgatccacactgttcgaaggcgcggttgaggggcatgtccttgttaagaatattagaaatgcgctgccgctgaaacagcctaaactgcttagcatctttggctatagcgcaaagaatccagatcataaccaccctaccggtggtttgtcagcctggttgtggggctcggagccttatagcttttctgagttccgcgatgcattttattgggggaaagcgattcagacccccatcgcgttcaatggcaccttatatagcggcggcggctctggcgcaacttcacagtcactcgcggtttcgccgtttgacgctctaatagaacaagcctacgatgatgggaccgcactgttctgggacttttattcgggtacgccggatgtgaatccaatgtcagatgcatgtctagtttttgggaacgcgtattcgaccgagggtgcggatcgcccgtgcgcgcgtgatgattttactgacaacttaataaaacacgtggccgaccgttgcaacaatacagtcgtgatctttcataacgccgggatccgtctggttgatcagttcgtggatcatccgaacgtgacggcccttatttttgctcatctgccgggccaagcgagcggtaaagccctggtaagtctcctctacggccgctctgacttcagtggtaaactgccgtacaccattgcacgtaatgaatctgactactctgtactgggcccggacttgccgcagggtatctttacatcttttccgcagtccaattttaccgaaggcgtgtttattgattaccggcactttgatgcccacaacatcaccccgcgttacccattcggttttggcctgtcttacagtagcttcaattacagtaacttggttattcagaaacgcgaagaacaggacttcggcgaatatccgacgggcttgattgtagaaggtggtcaagaagatctatgggatgtactgattctggtgtcggccgatgttagtaacgggggcgacgtagcaggtgcagaagtagcacaactgtatctgggcattccggccgagggagccccgattcgccagctccgtggattcgaaaaaccgttcctgaatgtggcagagaccgccaccgtgcgtttcgaacttacccgccgtgacctgagtgtgtgggacgtgataacccagaaatggcgtcttgtgcgtggcgagttcacggttgaagtgggcagcagttcacgcgatctgcccttgaagggtaaattcgtgatttga

SEQ ID NO: 624 - DNA, 2265 bp, Artificial Sequence
  6xHis UPI00022B9A15
atgcatcatcatcatcaccacgagaatctgtattttcaaggaagtatgaaccaagacccagaaaagctgctggaacagctgtccctggaagaaaaggcctctctggtgagcggcactgatttctggtacaccactgcgattgagtgtctggacattccgagcttgaacctcactgacggtccggcaggtctgcgcaaacaagccggtgatagtgacgcgttaggcttaaacaaaagcgtggaagcgatcaactttccagctgcaaatttgatcgcatgcagctttgaccgtaaagcactccaagaactgggcgaacgcctgggcaatgcagctcagagcgaggatgtctcaatccttttaggcccgggcattaacatcaaacgttcaccccttgcaggtcgcaatttcgagtttttttccgaggacccgtatctgactggcgagctgggtgccgcatacgtgaaaggcgttcagaacaaaggagtgggagtgagcctgaagcatttcgtagcgaacaatcgcgaaaatcagcggttcacggtcagctccaacattgaagagcgtccgttacgggaaatttacctgcatgcattcgaaaccatcgtgaaggatgcacacccttacaccataatgtgctcgtacaacccgctgaatggtgtcttaaatgcccaaaaccgtaccctgctgaccgacattctgcggaacgaatggggtttcgacggtatcgtgctgagcgattggggagcggtagccgattcagccgcgtctgtccaggcaggcatggatctggaaatgccgggtaaaggtaaagcttctcagcaggccgtagtcgaagcggtacagaataaccagcttgcggttgaggacctggataattcagtcctgcgcattctgaaactgattcagcaattaacggataacgcccagacagatccgagctacgataaagaaaaacagcacgagctggcgcgcgttctggcgtcgaacagtatggtactgctcaagaatgatgagcaggtgctgccgatcaaagaggatgattcattacttgtagtaggcgaactagccgataacccacgctcgcaagggggtggctcaagccatgtcaatgcgtacaaagtatcttcaccactggaaaatatccagtcgggccactctaacgtgcattttgaacagggctatcaccttgaccagaccgccgacaagaacctgagcagcaaagcgctggaggcggctaaaaaagcagacaaagtcgtgctctttgcgggtttcccggaatcgcttgaaagcgaaggattcgacaaggacagcttactgctgccagaaaaccagaatcgtctcatccaggagatcagccaggttaacgataacgtggtggtggtcctgcaaaacggctccgttgttgcaatgccgtggattcatcaggtgaaagccattctagaaacctacctggccggcgaaactgtgggtgaagcaacctgggatgttcttaaaggcacggttaacccatcgggtaagttagcagaaacctttccccagcgcgtggaggataatccgacggccttaactttcaatgcatcgacgatcgatgagaattaccgcgaaggcctatttgttggctatcgttattatgacaagaagaaactggcgccgctctttcctttcggccacggcctaagttacaccaccttcgcctatcaggatctgacagttgaggagaaagagaataatttcattctgacggtaaccctgtctaatacgggcaaagttgcgggctcagaagtggtgcaggtctacatctctaaccaaacctccaatatcgaaaaacctgaaaaagaactgaaacagtttgaaaaagtttatctggagcccaacgaaacgaaaaaagtcaaaattgttctggacgatagcgcgttcatgtggtataatgtagacaaaaaagattggcaaattgatgacggcagctacttagtgcaggtgggctctagctcggcggacattcgtttgacgcaagaagtgacgattcagaaaggcacaaaaacccacccggaagttactagcgatacctatattgcagatatcatgaagcgcgacgacctaaaagacctaatcgcgaccaccgaatttggtaagaccctgaataaccttatcggcgacgacagcaacagtaaaatgttagaaaacatcccgctccgtgcggccgaaatgatgggtttcagcccggcccaggttaaagcgttcattgataaagcgaacgaaaagtga

SEQ ID NO: 625 - DNA, 2220 bp, Artificial Sequence
  6xHis UPI00024F0867
atgcaccaccatcaccatcacgaaaatttgtacttccaagggagtatggagcagcagctgaatagttacctgcagagcatgaccttagaggaaaaagtggatcagttattacaactcgtgggcgcgttttttgaagacgcaggaaccgaaggtcaaatcaccggcccgatcgcgagcttgggaattaccgaagaaaccgtgcacaatgtgggcagcgtactgggtctggccggtgccaaagaggtgatccgtgtgcagcaggctcacctgtccaagaatcggcttggcattccccttctgatcatggccgatatcgtccacggctttaagaccatcttcccgatcccgctggcgattggctgctcttgggatatgcgtttggcggaggaaagtgccacaattgcagcacgtgaggctgccgttagtggtattcatgttaccttcgccccgatggtagacctggtaagagacccgcgttggggtcgtgtgatggaaagcactggcgaagatccgtacctcaattcagaattcgctcgtgccttcgttagggggtttcaggggaaagacttaacgaatgataccgatcgtgtagccgcatgtgtgaaacattttgcggcctacggtgcaggcgaaggcggccgtgactacaatacagtcgacgtgtcggcgtggcaattgcgcgaatactacttgccgtcctacaaggcggctcttgatgaaggctgcgaaatggttatgacctcctttaacaccgtggaaggggtagctgcgactggcaataaacgcctgatgcgagaccttttacgtgatgaatggggctttgatggcgtgctgatttctgactgggcggcgatcaaagaattaatcccgcatggcatcgcggaggatgaacgcgaagcggcgcaaaaagcattgttggcaggtgtggacatcgaaatgatgactagttgttacaatgggcacctaccggaacttgttcgcagcggacaactggacgaagcgctggtggatgaggctgttatgcgtgtactcaaactgaaacagaaactggggctgtttgataatcctctgcgaggagcagatccggaacgtgaacgtgaaattgtgttctgtgatgctcatcgtgccgtagctaaagaactggcaatcaagtcctgcgttctactgaaaaacgatagtgtgctcccgcttaaacgaagccaacatattgccttgatcggcccttttgccgaatcaggtgatatcttgggcagctggagctggagcggaagccaggatgaagctattcgtgtggtcgacggtttccagtctaagatttcatcatctttacttaccgttgcaacaggttgtagtattgaggacatgactgcagaacagtatgcggaagcattacaggccgcttcacaggccgaaatcatagtgctagccctcggagaacgctccgatatgagcggcgaggccggatcaaggtcggatattcgattaccgcaggcgcagcttgaacttattaaacgtctgaaaacgttaaataaacctatggttgccgtgctttttaatggccgccctctggatctgcatggcgtgattgaagaagcggatgcggtactggaggcgtggtttccgggtggcgaggggggagccgccattgccgatttgctgtatggcgacgccgaacctacgggccgccttaccatgtcatttccccagagcgttggtcaggtgccggtttactataatcatttcaacacaggtcgtccgcagctggatccgaacacgaaagaacgttatgtctcgcagtatctggatgtaccgaacgaacctctgtttccgttcggctatgggttgagctataccgaagttgcgtatgacagtattcagctatctagtgaaaccttggtaccgggacaggcgctgaccgtgaaagtacgtgtgaccaatacgggggcacgaccggtggaggagaccgtccagtgctacgtgcgtgatatttcgggtgatacggtacgccctatgaaggagctaaaggattttcacaaggttctgcttgcgccgggcgaaagccgcgaagtggaatttgccctgtcagaaccccagctccgttatcaccacgcagatctgagcttttcaagcgatagcggggagtttgcagtcttcacgggccccaatagtcgcgacacgaccgaaggccgttttcaactggtaaaggaaacgggcaaatga

SEQ ID NO: 626 - DNA, 1401 bp, Artificial Sequence
  6xHis UPI000265AA4B
atgcatcatcatcaccatcacgagaatttatactttcagggcagcatgtcaacggcggaactgaaaagagcggattttggtgacttcgtttttggcgctgctacctcagcctaccaaattgaaggggcgcacgatgcggatggcaaaaccgactcgatttgggatacatttactcgacgccgccgcaaaattaaaaatcgcgaacatggccgtgtggcgtgcgatcattaccatcgcgtggacggcgatgttgccatcatgcaaaagctgaacctgcaggcctatcgtttctcaatcagctggccgcgtcttcaacctaccataggcggtgctgaaaacatccgtggtacggatttttattcccgtctggtggataagttgcttcgtgcgaatatccgtccgtttatcaccctttaccactgggatatgccccagtacttggaagacaaaggaggttggattaaccgcgatacgattggtcgctttgcagattttgcgtctctggttggtcgtcgccttggggaccgcgttaaagacttcattgtgttcaacgaaccgatgattttcctgagccttggtaatttactgggcttgcatgctcctggccgtagaagtcttagaggctttttcgcagcatcgcatcacgtgctgctcgcgcaggcggaaggagcccgtgcgttgcgagccgttgttggaagcgcggaaattggcacgaccatttcagcgaccgcagcctatccagcatcaacttcgccgcgcgacgtattagcggcccagcgctttgacactctgtttaacaccttttaccttgaaccggtgttgggtaggggttatccgaccgcgcattttccggccctgcgccgcattgaaaaacatatccgggcgggcgatatgcagaaactgcaatttgattttgatttttggggcctgaacacctatacgcgtaaacgtgtgaagtattcacgctttatccctttcgtacactggcgtgaactgaagaacgatccgaacgtaccggaaaccgctatgcgttgggagatttatccgcaaggcatctacgacctgctcaagaaatacggcagctacccggaaataaagaagctgtatgtcaccgagaacggcgcagcgttccacgatcaggttgtacaggggcgtgttgccgatagttatcgtattgagtatttgcgcgagtacctgagagcggtgcagcgtgccaaatctgaaggtgtcaagattgcgggttatttcgcatggagccttttggataattttgaatgggcagaagggtatcatgctcgcttcggtcttactcatgtcgattacggcacgcagaaacgtaccatcaaagatagcggatactggtactcacgcttaattgcagccggatctgaaccgacctga

SEQ ID NO: 627 - DNA, 2388 bp, Artificial Sequence
  6xHis UPI00027DFDB2
atgcatcaccatcaccatcacgaaaacctgtatttccagggttcgatgacgccggatcagattcttcgtaaacttacccttgacgaaaaagtggcccagctgacgggcgtgatgatgaccgatcttcttgccccgccggtagaaggctcggacgcggcgttttcttttgatgttgcacgcttggcctcactgcgccctcacggggtgggtcatctttcgatggcttggtttgccgggagtacgcgagaacgtctgcgaaatgatgtatcagcaatccaggcacagattaccgaatcagccccttttggaatcggtgttctggttcacttcgaggcaattagcggggtgacccatcaggccgccccgcagtttcctacagcgtgggctcaagcggcagcatgggatccggaactgatcgaagcgcaggcggcagtgagctcagcttacgttcacgacgtaggcggccatctggtattttctcctgttatggatattgctcgcgatccgcgttggggccgggttcatgaaacgtacggtgaagatcccgaattagtggcgcgcagcgcggtgagctttgtgcacggaatccacggacgaggtgcggcaccgagcgttttagcgaccggcaagcacttccttgggtatgcggcaagcgaaggcggcttaaaccaggctatcacgaccttgggtcgtcgcgcactcgtcgatgaatatgcggaacctttccgccgcgcaatcgatgaagcgggtcttgcggttgtcatgaatagctataatgatatagacggtgttccagcggtggcaaaccgctggctcctgacagaactgcttcgcgaccagttaggcttcacaggcatggtcgtgtccgattatgatagcgttaagatgctggagaccattttccataccgcacgtactccgggtgaagctgcggcccaagcgctggcagcaggcatcgatgcagaacttccgtcaatggatcgcttcgcgggtctcgctgatgaagtgcagagcggaaggttagatgagcgtattgtggaccaagccgtggagcgagtgttggatctgaaaaatcgtttaggtcttatcccgggtagcgcgcgccatgcaggtcgtccggcgccaccggctcatgagactgcagcgctgggcaaacagattgcagaccaggcagtaacgcttcttactaacgatggagtattaccgttgaaaccaggtactcgtatcgtggtagtgggaccggcggccgacgaattacgtattcacttcggtgcttacacgtcagcttcagacgcggaaatgctgcttggctcccgcgcgttggcggccggggaaattccgggtatcgacccggaaacctttgtgtttacggacatctttcaggcgcgaatgccgggcattgagcctcgatttgaaatgaatgcccgtgcagcacatccagacgcgccgacccttctggcaagtctgcgagcccgttcaagctcagtggcctgccatccgattggtagcttcctgggtgatgcgtcttggggggatgaaagcttagccgcggttttggcggaagcagacgtagtagtagcagcggtcggggagcgcaccggatgggtaggcaataacaccgcaggcgaaggccagactacggcggaaccccgtctgcctggcgatcaagaaaagttaattcattcaattgcacaactcggcgttcctgttgtaaccgtggtggttacgggccgtccactgctcttagaagaggtaagccagcaatcaaatgccctggtattagccccgctcttaggtgaacatgcgggtccagctatcgcggatgtcctgtttggcacggtaaatccgtccggtaagctaccgagcacattcccgaggagcgtcggacaattgcccatctatcacggccaccattatggaagcggctacgatcatccgtctggcacccgccacgggtataacgatcttgcggattcttccccgctgtttgctttcggccatggtctatcctacaccacctttgatgtaacagaagcggccgatacttcggccaaggctgatgagctcgcacttaccgtaacggtgactaacaccggtaaatgcgcgggctctactgttattcagctctatggtcgtgttaccgccgcacccgtcgttcgcccggtgagacagctgttagattttcgtcgtgtggaattagatcctggtgaaagcaccagccttgccctgagcgcgccggttacacgccttagctacacaggtttggatggtagtagatacgtgccggatggtacggttgccctttcagtgggactggctagtgacgatatccgtatttcgtccacgattgaattaccgcgctatgagcgcttgtatggccgtgtgtga

SEQ ID NO: 628 - DNA, 2610 bp, Artificial Sequence
  6xHis UPI00029074B1
atgcatcatcaccaccaccatgaaaacctgtatttccaggggtctatgaatcgcagcttcctggatgcttcgattccggatctggtgaagaagctgaaagtggatgagaagatctcattactgggcgcgccgaattggtggaataccactccaattcctcgattgggcattcctagcattcgcatgtcagatggaccgaatggcgtgcgtggcagcagtcactttgtaagcactccggctcagtgtctgccgtgtgcgacctcactcgcaagtacgttcgatctggacctgatccagaaagtcggcgcctttttagggcaggaagcgaaaatcaaatcttctgtgctgctgttagccccgacttgcaacattcaacgtaatcctttaggcggtcgcgcctttgaaagtttttctgaagacccgtatctgtcgggagtaatggcggcggcctatgtccgcggcctgcaatcggaaaacgtttcggcagtgattaaacatttcgttgccaacgatcaggagtccgagcgcttagcggctgactcggtgatgagcgatcgcgcactgcgagaaatttatctctacccatttatgctggcccagcgtgatgcacagccgtcggcctttatgacctcgtatggtcgcattaaaggcatccattgttcggagaattctgagctgctgcaaaacatattgcgccgtgactggggttttaatggcattgttatcagtgactggtttggtacgtacagcgtaagtgaagcgatcaacgctggactggatctagaaatgcccggccctccacgatggcgccagcccctgttagtactgcagacgctatcaacgcaaaagatcctcctacagaaaattgacgaatgcgtctcgaacttactgacctttattcagaaacaagcgcgctgcaacccagaagtcgtctatggcgatggcgtggaacgaactcgcgacaccccggaaaaccgcgcattttgtcgtaaactggcggccgaaggtatggtcctactgaagaataccaacaacgtgcttccgctgtccccgaataaagttaagcgcgttgcgataatcggacccaatgcgaaagaacgcgtgatttcgggcggtggaagtgcggcgctcaaaccttcttacgtggtttcgccatgggatgggatcacccagaattcaccagtgggtatcgagttcatgcaccacaccggctgttatgcccataaatacctgccgacacttgagaataacttggtgactccaagtggcgaacctggctggttgtgtacattttatgcgcacgatgagtcagaaaagcctgatacgcccattgccgagttcaaactgcatgatacccgtatcaaactgaacgactttttgccgccgggcttaggtagtgagtggaccatcaaattaaccggcaaacttacattcgaaaaaacggcggagtttgagctggggcttactgttgcaggacgcgcaaaactgtgggtcgatggaaaactgaccattgacaactggacaaaccagacaccgggtgatttcttctacggccagggaaccgtggaggaaaaagccacggtgaatttcagcgcgggaaaagcagtcgatgttctggtagaatacaccaacacagtggcgtccgatacggacgatgaccaacatggtggcgatcgtattagtcaacctgccctgatgcgcggcgtgcgcctgggtggctgtgaaaagtttgatgcggaagaggggatcgctgaagcagcggccctggcaaaagagagcgacgtggtaatcttcgttggtggtctgacccccgaatgggaaagcgaaggttttgaccgcccaacgttagatatgccgggcctgcagaatcagaccattagccgcctggcagatgcaaaccctaacacgattgttgtgatacaagcaggctcagcggtgagtatgccgtggatcgatagcgttagtggcattttacaggcgtggtacagcggtaacgaactgggtaacgcgctgtctgatgtgctcttcggcaaagtgaatccgagcggccgtctcccactgacattacctgcctgtatccaagatagcccggcctacctgaatgataaatgtgagaacggaaaaatccattaccgtgaggacctgtttgttgggtataaacactatcaagcgcgtggcattaagcctctatttccttttgggcacggcctgtcgtatacggcattttccttgaatgatctccaggttagcatgccgagcgaattcgacgcgagcagtcgcgtaaccgtgagcgccttactaaaaaacgagggccaggttgtaggttccgaagttgtacagatctatgtgtcatatcctgttgacctgggcctgacgactccggtgaatcagcttcgtggttttcgcaaagcccatgatgtagtgcctggtgccagccacaagctcgatattattcttgataaatatgccttcagcctttgggatgaattgcgatcagcctggcgtgtttcagcaggccagtatttaattcatgcgggcttttcgagtgatgcgctccctctcagcgtgtcggttgaaattccgcaaacgttcttctggaatgggctgtga

SEQ ID NO: 629 - DNA, 2550 bp, Artificial Sequence
  6xHis UPI0001B67634
atgcaccatcaccatcaccatgaaaatctctacttccagggatctatggcgtcggtcgatattccagcgatccttgcgaccctgtctctggaggaaaaagtttcgctgttagcggggaaaaacctgtgggaaactgtgccggttccatcaaaaggagtgccgaatgttaaagttagcgacgggcccaatggcgcacgtggcgcgagctttgccggcggtacaactgccgcgtgcttccccgcggcctgcctgatggcgagcacattcgacgtaaaactggcaaaacgtattggcagcgctctggccgaagaaacccaaagtaaaggcgctcgctgcctgctagccccaaccatgtgcctgcatcgtcacccgttaggcggacgtaattttgaaagcttctcggaggaccctttactgacgggtaaaatggccgcacgtgttgtagaaggcttacaagacaaaggcgtgtccgctaccattaaacatttcgcggtaaacgagcaagagactgatcgtctgacagtggacgaaaccgttaacgaacgtgcgttgcgcgaattgtatctgcgtccgttcgagattgccgtgaaagaagccaacccgtgggcagttatgaccgcctataataaaattaacggccatcacgccgactgccatccgttcaccctgaaaaaagtgcttcgtggtgattggggttggaatggactcgtgatgagcgactggggcggtaccaattcaacgcccgatagcctggaagcaggccttgatctggaaatgccgggtccgacccgctggcgtaaacccgaagatgtgattgccgcgatcaaagagggtaaaacctccgaaaagaccatcgacgaacgcgccacaaacgttctgcgctttctggagcgcttaggatgtttcaaagatccgaccattcctgacgagaaagccataaacaagccggaacatcaggcgctgattcgcgaggcaggctcgaaaggcatagtgctcctgaagaaccaggacaagattctgcctctgtccaaagagaaggtgaaaggcaagaagatcgcactgttaggccatgcgaagatcggattagctcacggcgggggctcagcaagcgtatcggcccactataaggtaaccccgtgggacgcactacatgaagcattgggagattcagttgaattcagttacgcgaagggcgcgcatacctttcgtaccctgcctgcgatagctgagaatgtggtgggcctggatggaaaaccgggctttaccttcaaagtctacgagccgggtagctctgagcctattgaaacccgccacggccatgcagattcggaagtgtcagcactgggctccttcggttttctgaataaagatgtgtcactggagggcgcgtttacccctcaggaaacggcgcagtattattttacctgctccggccttggtccgtctaaattaatcattgacgacaaggtggtgtatgaacagaccgagaactgcagtgatgcgatgggtttcctgttcggtggtgtggctgccccggaatttaaagtggccttagaagcgggccgccagtataagttagtgctgagaacgagcccgcccagcgccaatgatcgagaggatctcgggattcttgaagggctgtgtggcttacgtgtgggtagcatgagcgagagcgaacatgatcgtgatctcgtatcagaggcagttgaggtggccaaaaacgctgactatgcggtgatctttactggtcatgaacctttttgggaaacggagggccaggatcaggtaagctttaatctgccaaaagatggatctcaggaccgtctcatcagtgccgttgcggcagcgaacccaaacaccgtggtagttaactcaacgggtgttgcgatagcgatgccgtggcttaacgaaattcagggcttcttacaaacatggtaccccgggcaggagtgtggtaacagcattgctgatgtcctgacaggggcgcagacaccggaaggccacctgacatgtaccttcccgaaaaagattgaggattgtccggcatacggtaactttcctggggagtacgataatggcaaactgaaagtcacgtacaaagaaggtgtgtttattggctaccgtcatttcgaccgtctgccggccgataaagtgaactttccgtttggcttcggcctgagctacacgacgtttgatttttcaagcctcgaagttaaggaaagcggtgaaggctacactgcgtcgctgaaagtgtctaataccggcgatgttgtgggtgcaattgctgtgcaggtatacgtaggcgccgcgcaaaccgcggaagaaaacccggtgaagcagctggttgcattcgaaaaagtgacggtgaagccaggtgagaccgcgtccgtggaagttcctgtgcgtacccgcgattttggcttttttgacgagtcgaaacagaagtgggtggttaagggcggtgattacaaattcttaatcggcaagtcagcgcgcgatattgttctcgaatctaccgttgctgtgaaagagcagtcctttgatctgtga

SEQ ID NO: 630 - DNA, 2631 bp, Artificial Sequence
  6xHis UPI0001A25287
atgcaccaccatcaccaccatgaaaacctgtacttccaaggtagcatgaagcgtggctggattcccattatgggcgtttgcctggtgctgagtttttctgcttgcaaacagctgctgccgtaccaagacaccagtttaactgccgaacaacgtgcggaagatctcctgccgcgtctgacactggaagaaaaagtgtcactaatgcagaacgcgagtcccgcaattcctcgtcttggcataaaagaatacgagtggtggaatgaagccctgcatggtgtgggtcgcgccggcctcgcaaccgtttttccacagagtatcggcatgggcgcctcctttaacgattctctgttatacgaagtgttcaatgcgacctcggatgaagctcgtgttaagtcgcgtatctttggcgaaagcggtgtattaaaacgataccaagggttgaccttttggacgccgaacgtaaatatctttcgcgatccgcgctggggccgcggccaagaaacctatggtgaagacccttatctgaccggccagatggggatggcggttgtgcgcgggctgcaaggcccggaggatgcccgttatgataaattgcatgcgtgcgctaagcacttcgcggttcacagcggtccggaatggaatcgtcactcattcgatgccgaaaacatcgatcctcgtgatctctgggaaacctacctgccggccttcaaggatctcgtgcagaaagctcatgtaaaggaagtgatgtgtgcttataaccgcttcgagggcgagccttgttgcgggagtaaccgtttgctcatgcagattctgcgcgatgagtggggttacaaaggcattgttgtcagcgattgcggggccattagcgatttttatcgtccaggcacgcacggtacgcatcctgacaaagagcatgccagcgcaggtgctgtacgtgcagggacggatttggaatgcggctctgaatatgcttcgctcgcggacgcggtaaaagcaggcctaattgacgaaaaagaaatcgatattagcctcaaacgcctcctgactgctcgtttcgaactgggcgaaatggatgagcagtcggcgtggagtgagatcccgaccagcgtgttgaatagcaaagaacaccaggcgctggcccttcgcatggcgcgtgaaagtctcgtattgttgcagaacaagaacaacatactgccgctgaacacccatttaaaagtggcagtgatgggccccaatgccaatgacagcgtcatgcagtggggcaactataacggcattcctgctcacactgttaccctgttagaagcggtgcgcgcaaagctgccggagggtcagattatctatgaaccgggttgcgatcgagtggatggcaaaactctgcagtctctgtttgatgaatgttcgatcaacggcaagccggggtttctggcggaatactggaataaccgtgaccgagaaggagaggttgtggcgaccgaccagatttcaaccccattccattttgcgaccaccggtgcaactacttttgcgccgggggtggaaattacaaattttagcgctcgctatgaatccgtgtttcgcccgtcacaaagcggcgatgtcgcgttccggtttcaattagatggcgaagtcacgctgattatcgatagtgaacaggtggcacgcaagatttatgttaaaaatccgactaatctgtacacgctgcaagcaaaagcgggcaaagagtatcatattgaaatcctgtttaagcagcgtaacgaaagggccaccctagattttgatctgggtaaagaagtggggattgatctgaacctggcggtcaaaaaagttatggatgcagacgttattttgtttgcaggcggcatttctccttcacttgagggtgaggagatgcctgtggaagttcctggttttaaagggggggaccgcactgacattgaactgcccgatgtccaacgcgatctgctgaaagcgctgaaaaaagccggcaagaaagtcgtgtttattaattactcaggctccgcaattgggttagtgccggaaacgaccacatgcgaggcgatcctgcaggcatggtatcctggccaggcgggaggtacggctattgtagatgccctgtggggagaatacaaccctggaggccgcttgcctgtaaccttctataaagacgtcaaccagctcccagattttgaagattacagcatgaaagggcgtacgtaccgctatatgcagcaacagccacttttcccgtttgggcacggcttgagctatacaacgttcacctacggggaagcgaaactgtctaaaaataccattgcaaagggtgaaaacgtggtactgaccattcctgtttcgaatgtgggacagagagacggtgaggaagttgttcaagtatatctgcgtcgccctggcgataaggagggtccacggtataccttgcgagcatttaaacgtgtccatattcccgctggtaaaacggaatccgtagccattagcctgacccatgaatcgtttgaatggttcgatgaagccacgaacactatgcacccagttgccgacacctacgaactgttatatggcggaacgtcggaacaaaaccagttgaaaagcgtaaccgtccatgtgcagtga

SEQ ID NO: 631 - DNA, 2328 bp, Artificial Sequence
  6xHis UPI0001DD9790
atgcatcatcaccaccatcatgaaaacctgtactttcagggttcgatgaagaaccaggaaaagctgaagaaacttaccgtagaacaaaaggcccgcttatgtatcggcatgaatttttggatgagtcaggattacccggaagcggaggtggaaagcctgtttttttcagacggtccgcatggtctacgccaacaggatgtccaacacgcggatcacctgggtctgaacgaaagtatttcgtcgatttgctttcctacgggatcggccctggcctgcagttggaaccgtgatacgtttgccaaagttggcgatgcattaggtcgcatggcaaaacgtgcaggtatccacatggtgctgggcccggcgattaatattaaacgtagccccttatgcgggcgtaacttcgaatacttaagtgaagatccgtatctgacgggcgaattagccactgcctttgtgaaagctatgcaagaaaatcatgttagcgcatgtcctaaacacttcctggccaataaccaagagacccgccgcaaaagcattaataccattgtggacgaacgtaccttacgcgagatatacctccctggtttcgagaaatcagtgaccgaagggaaaacaatgggcctaatgacatcatacaacaaggtgaacgcggtgtacccggctgagagcttggaaattacccgaaaaattctacgtgaagaatgggcattcaccggtaccctggtgagcgattggggcgcaattgatcagattgtgccatctatcaaagcgggtctgacgattcagatgccggggaacgatggttcaactgccaccaaaattattcaggccgtgagcaatggtgaactctcagaaaacgaattggatagcgcggtgatgaccctgctggacactctggaatttacgcacggcaaagctcgtgatactatcaccgaagatgaatgccacgcgattgcgctagaagcggcatgcgattctatcgttctgctgaagaacgaaggcaatgccctgccattatcgggctgccgcattgcagtgattggcgagatggccaagaaaccacgttatcagggaggaggttcttcccacgtgaatccgtacaaactgacgaactcatacgatgaaatgttaaaatattcttctgcaattagttatgccgacggataccatggcgatacgagcagcgaggaagttctcaaagaagccatcggtgcagcaagccaagccgatgcagcagtagtatttgttggtctcccagccagctatgaaactgaggcccttgatcgcacctcgattgaaattcccgaagattacaaccgtctcgtggaggaagtattagctgtggcgaataaaacgatcgtcgtgctgtgcaatggaagctctatcgcctttccgtgggcagaccgtgttgatgccatactggaagtgtatctgtgcggcgagtgtagcggtgaagcgattgccaaaaccttattcgggtacaacaatccgtccggtaaactggcagagagttttgtaaaccgccttgaagatacgccggccttcttagattttccgggcgacggacgtgaggtacgctacacagaaggcgtgttcgtcggctatcgctactacgacgttaaaaaaatcgaaatgctgtacccgtttggtcatgggctttcttacaccgatttcacttactcaggcctgcgcctgagctctgcaaaaatgtcgagcaacgatacgctgtcgctgtctgtgatgatcaaaaacacaggcaataaagcgggcgccgaagtcatccagatttatgtgcagagtccgctgggcatggtaaaacgaccaattaaggaactgaaggggtttgaaaaggtgtacctggaaatcggcgaggaaaaagaacttgaatttctgctcccgccacgcgcgttcagctattacgaacgtgatttgcatgattggtatacaccgtctggtgaatacaccatccatgtggggagcagctcgcgcgatctgcggcttagcggcactgtcttcatgcataatgagtactctttcattccacgcattactcgcaactcactgctgatggacattttaccgcatccggacctttttgaaattttcaagaccacctatgcgaaaattaaaccgtatttgccttttggactccataaagccgcgctggacgataaggtgagccaggccctgctaaagaacatgacatttaactcgctggcaggatacgtaggtaatcacttgtccgacgaagatattgaaatcctggtcaaaaagatgaaccagaaactcggcgccaccctgagtgtcaccaaagagcgtaattga

SEQ ID NO: 632 - DNA, 2640 bp, Artificial Sequence
  6xHis UPI0001FC42E9
atgcaccatcaccaccaccatgaaaacctctattttcagggttcgatgcctctctgtaccccctatcgctctcctgtccttacagccgactccacgtcgggaccagcattaacagacgttgtgcgcggtccgccagtacattgttgggacatggttcaaaccccgccggccgcaagcccgcctacgcctgactttcaatcctgcctgcgtcgcgccgaggccctgccactgcccgaggtgctcgcacttctcagcggacgtgactattggcacacacaagcggcaggcggtgcgcgcgcgcttcgtatgactgatggtccacatgggatccgtcgtcagcttggagatcaatcacgtagcgacctgaacaattccgcccctgccacctgctaccccactgcaagcgctctggcggcctcgtggaacccggccttggttggggcagtaggtgagatgctgggacgcgaggctcgtgctgaaggggttgacgtactgctgggaccgggcctgaacctgaaacgctcaccgctttgcggtcgcaactttgagtatttctcggaagaccccttactctccggtgaccttgccgcggcatgggtatcgtctatccagagtcaaggtgttggcgcatcactcaagcatttcgtggccaataatcaagagtatcgtcgtatgagcattgacgcggttgtggacgaacgtgcactccgcgaattatatctggcgggctttgagaaggccgtacgtggagcccgcccttggacagtcatggcggcctacaacggggttaacggccgttattgttgcgaatccccgcgcctgctgcaaggtattctccgccgcgagtggggatacgacggccttgttgtctcggactggggagccgtttccgaccgcgccgcagcgtttcactcaggattggatttggagatgcccggggtgccggccctgaccgcgcctgctctggaagtggcgcttcgcgagggccgcgttcaggaagcggagctgcgtcgcgcagcggcgcgcgtgttacagctggctgcgcgtgcggacactgcccaggccgctgagcaaccgttcgacccggaagcagcgcacgcgctggcgcgtgaggcggcggtccaaggaagcgtgttactcaagaacgaccgcctggacggaactcccttgctccccttgcgccctgacaccggccgtcttgccgtcgtgggagcctttgccgcgcaaccacgctaccaaggcgctggcagtagtcaattggtcccacgtcgtcttgatattcctctggacgcgctgcgtgaagcattcggggcagcacaagtgacatactcggccggctacccgcgcgcaggagatcaaagcgacccgcagttgctggcggaagccgcccaagcggcggctcaggccgatgttgtcgtggcgttcgtaggtctgccggaagcattcgaggttgagggaatcgaccgtcaacatttgggactccccgcctcgcataacgcgttgatcgaggaactcctggtgtcaaacccgcgtctggttgtcgtcgtacaaggcggagcgccggttgagctgccatgggcagaacgtgtgcctgctatcctgaatgcgtacctcggtggccaagcgggtggaagcgcagttgccgcacttttgtcaggggcggccaatcctagcggacgtctggccgagtcgtgggccgcacagttggaacactggccatcgtcggaccaatatcctggtggcccgcgcactgtcgagtaccgcgaatcgttactgctgggttatcgctactttgatcgccccgaggttcaggcgcccgtaccattcccgttcggccacggtctgagctacacgcaattccgttatagcgatgcccgcccagcggctgacggccgttcggtgactcttacagtcaccaacgtgggctcgcgcgccggtgcagaggtggtgcaattgtacttgcatcgtccacaggagacgagcgccgtgttacgtcctgggcaagcattggccgcctacgcacgcgcggagctggcgcccggggagtcccaggacgttactttaacattaccggcccgcgccttcgcacactacgaccccttttggggccgttggcgcactgaggctggggaatggcaagtgcgcattggggcctcgtctcgcgacatccgcgttcagtatcgtgtgcaagtggctggtgagactctgcgctacgagcaggaacccggcggcggcacactgccggcttcgtatcgccgtttgtcattcccgcttcgcgtatcccgctctgatttccaagcactgtacggtcgccccctgccggataatcgcgactatcgcactggttcgtacacagccaatacccctcttgatgccatgcaagagcatcccttggcaagcggccttttccgcgttcttgtttggcatcagcgtgatctggttggagacacgggcgccagcatgaactcagcccacaatttgcgtcaactccccttgcgcgctatgaacatgaatccgggtttgacagcgaacccgccgttagcccgtttccttgcagaagtcatcaatcgccactatggccctgccctgcgtgagcttcgcctcgcgcttcgccgttcatggcataagcgtcgccattaa

SEQ ID NO: 633 - DNA, 2433 bp, Artificial Sequence
  6xHis UPI0002033A0A
atgcaccatcatcaccaccatgagaatctgtatttccagggttcaatgatcaaacgtcaaattaacctggtcctgatcctgattatcatttgtccgctgctctcgtttaaatatgttaaaccgcaaccgatctataaagacccgaggaagccaattagtgagcgcatcaaggatcttttatcaaaaatgacggtcgaggaaaaagttggtcaattagccacgttattgggctgggaaatgtatactaaatcagataaaggcgtgaccgtatcaacaaaattcaaagaggcagtgcagcgtgaacacattggtatgctgtgggcgacgcttcgtgcagatccgtggacaaaaaaaacacttgaaacggggttgagtccgcaagaggcggcgatggcgaccaatgctcttcagaaatatatggtggattccacgcgtttgggtatcccgctgctgttgtctgaagaatgtccgcacgggcacatggccattggaacgaccgtctttccgaccgccatcggccaggcgtcgacctggaacccgacgctgattcaagagatggctcaggcgattgccgcggaaacccgcgccgttggcgggcatgttggctatggcccgattttagatctggcccgagaaccgcgttggagccgcctggaagaaacatacggtgaagatccagtgttgaatgcgaaaatgggccgtgcgatggtgaccggcttccaagggactgatctgtcatccggcaagaacattatcagcacacttaaacactttacggcatacggcgttccagagggtggtcataacggtggctctgttactgtgggtcaacgcgaactgtaccagtcctacttaccaccgtttcgtgaagctgtaaaagcgggcgcgctgagtgtaatgacggcgtataacagtattgatggtatcccgtgctcggccaacccgtggctgctgaaagacctgttacgcaaccaatggaatttcaaaggctttgtagttagcgatttaggatcgatcagcggcctcgtgggctcccatcatgttgctgccaacgcagcggaagcagcgagccaggccattaatgccgggttggacgcggatttatcgggctatggatatggccgcgcattgctggccgccattaaagaaggtaaagtgaccgaggcgaccttggatactgcggtgtcacgcgttctgtaccagaagttcgcccttggtttgtttgagaacccgtacgtagatatcaaacaggtttcccgtaccgtgcgcatccctaaccacattgaactagcccgcaaagtggcgcagcagtccattatccttttgaaaaacaacggtaatctgctgccactgagcaaaagcattaaaaaactggcgctgattggtccgaatgccgacaacatctataaccagctgggggattacaccgcaccgcaggccgaggagaatattgtgaccgttctggaaggcctgcaagcgaaactgggcgcaggtacacgtatcgattacgtaaagggttgtgatattcgcgatacgagcgaaatcgccatttccacagcggtacaagcggcagaagcggctgaagtcgttgtgattgtgctaggtggctcttccgcacgcgactttaaaacgtcatatcaggaaaccggcgccgcccaggttaccgccacccaaggcaaaatctctgatatggaatctggtgaaggcttcgatcgtgccaccctagacctcctaggcaaacagttggaactgcttaaagcggttaaggcgacaggcaaaccggtggtcctcgtgactattaaaggtcgtccgctcaatcttaactggcctcaggagcatgtcgacgccattatcgatgcctggtatccgggacaggaaggtggaaacgctatcgcagacgtgctgttcggcgattataatccggctggtcgcctatcggtatcagtcccgaagtcggtaggacagctgccggtatactataattacaaaaacccgaccaaacacgactatgtagaggtagatgctaagccgctgtactccttcggatatgggctgtcgtacactaccttcgcgtatactgatatccgtcaccagttgaccgaaaccccggatgatttcaacctcagtattagtttcaaagtaaaaaatacgggcaagtacgcgggcgatgaagtggttcagctgtatgtgcgggatgagatcagctcagttgttacgccgatcctgcaactgaaaaactttcaacgtattcatctcaaagcaggtgaagaaaagaaaatggagtttgtacttcacgccgaagaccttaaattactgaacgcgcaaatgaaatgggttacggaaaaagggaggttcaagattatgattggttcatcaagtgataacatcctgctcacaaccgatgtcgaacttaataaggattacaacctgtga

SEQ ID NO: 634 - DNA, 2250 bp, Artificial Sequence
  6xHis UPI0001E54133
atgcatcaccaccatcatcatgaaaacctatattttcaaggtagtatgacattcccgcgtagtctgtttctggcgagcaccattttagccttccactgtaaccccagcttcgcccgtaacgagtcgcctgccaaagcaatagaacgtgcagataaaaccttaaaagccatgacgccagaagagaaaaccatcctcacccacggcatcatgcctctgaagatcctcccgaactcaccggagcctccggcagaagcaattccgggagccggctatatcaagggtattccgcgcctgggagttccagcattgtatgagactgatgcaagcctgggtgtgtcatatgtgttcggacttcgtaaagatggcgcgaccgcactcccgtccggcctggcgcaagcaagtacctggaatccggcgctcattgaaaaggccggtcgtatgattggagcggaaacccgtgcaaaagggtttaacgtgctgctcgcgggaggcgtaaatctcatgcgtgaccctcgcaacggccggaattttgaatatctgggagaagacccgctgttagccgggaccctggtaggccatgcgattcgtggcatccagagcaaccacatcattagtacgattaaacacttcgcctttaacggccaagaaaccgcccggaaactggtcgactccaagatctcggcagcaaatgcgcatgaaagcgatctgctggcgtttaagatcggcatcgaaattggcgatccgggcagcgtgatgtgtgcctacaacaaagtgaatgggcattccgcgtgtgataacaattggctgctgaataccgtactgaaacatgactggggctacaaaggtttcgtaatgagcgattggggcgccgtgccgagtttgggtgctgcgttgaatggtttggatcaacagagcggtgagcagttagataccgccgtgttcttcggggacactctggcagcagcagcaaaaagcaacccggtgtatgccaaacggctggatgacatgaaccgccgcattctgtgggcgatttacaacaacgggttggatgcgaacccagccaagccggggggcgtgatcgactttaaagcgcacggtgatatcgccgaacaggttgcgcgtcaaggcattgtcctgttacgaaatgagcgtggcgtgcttccacttgcagcgtccaccaaacgtattgctgtgatcggaggttacgcgaactcgggcgtgctgtctggcgcaggctcctcccaagtgcaggcggaaggaggacccgccgtgtacataccagcgggcaatggtgacgagaatagcagtttcattgcggaatcctatcataatagcgtacccctgaaagcgttacgcgctgcggcgccgaatgccgaaattacctaccgtaatggacgttatattgctgaagccgtggctcaggcgaaaaaaagcgacgtggcgattgtatttgccacccaatggaccagcgaagggttcgatgtaccggatatgagcttgccgaatggtcaggatgcactgttagcggccgtagcggcggctaatcccaatactgttgtcgttcttgaaacaggtggtccggttatgatgccttggttagactctactgccgcggttatcgaagcgtggtatccgggtgcgcgaggtgcagaggcgatcgctgcagtgttaaccggaaaggtgaaccctagtggcaaacttccggtaaccttccctgcgcacaaagaccagctgccgcgtgccgaagtcgatggcatggattcgaccgagccgagcttcctgggaatgccggaccttaagggccaggccctggtcgctgattacgatattgaaggatctaatatcggctatcgctggaacgcgttaaaaggcaataaagcgctgttcccgttcggacatggcctgtcctatacatcgttcgccgcgagcggcctgaaaaccgatggtgcccgagcgtcggctcgtattactaacaccggaaaagctgacggtgcaacgatcgcacagttgtatctagtcagtcgtacaggcaaacctgccagacgattggtctcgttccaacgtgtcgaacttgtagcgggtcagtcaaagcccctggccatgaccattgatccgcgtctgctgggcgactggcgtgacggcaactggactattgtcgcgggcgattacggctttgcgctcggtgaagacgccgagcatctgggtcctgtcaccactgttcgtctgaagggccgtacctggcgtgattga

SEQ ID NO: 635 - DNA, 1371 bp, Artificial Sequence
  6xHis UPI00021CACC4
atgcaccatcatcatcatcacgaaaatctgtacttccagggaagcatggcattcagcaaagattttctgttcggcgtggctacgagctcttatcaaatcgaaggggctttcaatgaggatggacgtactagctcaatttgggataccttctcaaagacgaaaggtaaggtgctgaatatggataacggtgacgtggcatgtgatcattaccaccgctataaagaagacgtggaactgattaaagaactgggcgtggatgcctatcgtttcagcattgcgtggccgcgcatttttccaaaagaaggcgaatacaaccagaagggcatggaattctacaaaaccctgctgaaggagctgaaaggaaagggtattaaagcggtagcgaccctgtaccattgggatttaccacagtggatccaggacaaaggtggctgggaaaaacgcgagaatattgaatatttcgtggaatatgcgaagaaatgctttgaagaactcgacgagtacatctatatgtggatcacacataacgaaccgtggtgtgcatctttcctgagtaatgcactgggtgaacacgcgccgggcaaacgtgatttgcaagccgcactgaaagttgcacatcacattcttctgagtcacgggatggttgtgaacttgtatcgcaaattggggcttaaaaagccgattggaatcaccctgaatctgagcccgagctatccggcgagtcgtgagttcaaagataaaattgccgcgaataattgcgacggatttttcaatcgctggtttctggaaccgttgtttaagggtagttacccgaaagacatggtaaacctgtacagcaaccgcgtgtcggacttctcttttattaaggaggaggacttcaacattattggcgcccgctgcgactttttgggtatcaattattacaaccgttccctggtggaatttgatccaatgtcgattctgttattccgaggtgcctattcggaatacaaaaaaaccagtatgggctgggatgtgtcaccggatgaatttattgacctgatccagatggtccgcgaaaagtacaccgatctgccgatttacattaccgagaacggcagcgcatgggatgataatttagtggacggccagatcaatgataccgatcgcatcgagtatctgattgaacatctgaaagcggttgaaaaaatgaatgaaatgggcctgaacatcaaaggttacttttactggtcgctgctggataactttgaatggggctacgggtacagtaaacgctttggtctggtctacgtcgattttaaaaaccaaatgcgtatcaaaaaggtgagcttctacaagtacaaagaaatcattaatcgccgcaccatttga

SEQ ID NO: 636 - DNA, 2265 bp, Artificial Sequence
  6xHis UPI000230E3BF
atgcatcaccatcatcatcatgagaatctgtacttccagggctcaatgctggtgagcttaccgtctccggctttcagtgctgaaccggtatggaaagatacctctcgtccagccgccgagcgtgcgaaagcgcttgttcaggccatgacaccggccgagaagcttcagttagttgtaagccactatgcggtggataacggccccggtaaaagctccgttcccaagggtgccgttggcggagctggatacgttccgggcatcgaccgcttgggtattcccgcccaacagattaccgatgcgggcctgggtattactaatccgaacaacgtgcgtcctggcgatggggcgacagcgctgccgtcgggccaaattttgtcaggcacatttgaaccagatttggcgtaccaagccggacaggtcctgggccgtgaagcgtttcatcgtgggtttaatgtactcctaggtggaggcggtgcagtactggtacgcgacccacgtaacgggcgtaactttgagtatctgggcgaagattcactgttagcgggtaacattgccgcagcgcagattcagggagtacaaagtcagcatgtgattgcgaccgccaaacagtttgcctttggcgcaattgaaacgaatcgcatgaaagtggatatgcgcattggtgaaaaagaagggcgcgagagcgatctgcttgcgttcgaaattgccgtcaagcagggcaacccaggagccatcatgtgcgcctataataaagtcaatggcgactatagttgcgagaatagctatctgctgcaactcccgaagcgtaattggggctatcgcggctatgtgttgacggattggggtgcgacccattccactgttaaaagcgcgaatgcgggtcttgaccaggagtcgggcgcaagctttgatcagaaaatctattttggtaaggatctgaaagaagccatagcaaaaggtgaagttagcaaaggtcgactggacaatatggtataccgaattgtgtactcactgattgacgtaggtgcgtacgatcatccggcatataaatcagatcaggctgaaaacgtggcagcggatgaagcgatttcacaaaaaatcgcggaaaacggtattgttctgctgaaaaaccatcacaacatcctgcccctgagcagccagattaagtcgatagcaattatcggtggtaaagctgatcaaggtgttctgagcggcggcggctcttctcaagtgactgcgcgtggtggcaatatcgtggatcacacgcgcatgcagcaatggccgggccccgtgtcttactttcctagcagcccgatgaaagcgatccaagcactggtcccaaatgccaaggtgaactttgcggcgggcaatgacatccaacaagcagttgacctcgcgaaacactcggatgtagcaatcgtgtttgcaacaaaatggtctgccgaagggtttgattctgccaacctgcaacttagcgcggaacaaaaccagctaattgaggcggttgcgaagaccgggaaaccggtggtcgtggtgctggaaacgggtaatccggttgagatgccgtggttacatgatgtggatggggtgctggcggcgtggtatcccggcacgtccggcggcccggctatcgccaatattctatttggccaagtgaacccgtctggccgccttacaaccacctggccgaaagccctgagtcaggtaccgtatccgtacattgagggcgcaggcaagatagttaacgcagatgtgcttgcagtgaagcagtatagctcagacaaccaggccgtgtcatcggtcaacctgaatgaagatggtgcaaacgtaggttaccgttggtacgagcaaaaacgcttgacgcctctgtacccttttggctacggcttatcgtacaccacgttcaaatataaaaaactgatcctggaaaaagatttcgacaaggatcgacataccatgatcgcaaatgtcacggtggagaacacgggcaaccgtgatggcgctgatgtgattcaaatttatggtaaaattccgggcgaaaccacatcacgcctgctcggtttccgtaaagtctatctaaaggcgggcgagacccaaaccgtccccgtgactctgttcagcgtaagtctggcgcactacgttcctgtaaaacattcatgggaaattattagcggtaactatgaaatcagtgcacgttccgattcgctgagccatgatgccttgaaaactaacatccatctggatcaaatagacgtccaggattga

SEQ ID NO: 637 - DNA, 2169 bp, Artificial Sequence
  6xHis UPI00024F07AC
atgcatcatcatcaccaccatgaaaacctctacttccagggctcaatggataataaaaagattattgaactcttacagaaaatgacgttggcagagaaaatcggtcagctgtcgcagaccacgggtgaacattacgtgggtaaaattgatatcgaaatggtcgaaaccggtccggatttcccggaccatatgctggaaggcgatacgctgtacactatgggtagcatcataggcgtaagtagcgcccgcattaccaatttaattcagtcaaaatacctccaaaaatcacgtctgaaaatccctctgctgtttatgcatgatgcgattcatggctaccgtaccatcttcccgattccgctaggcctcagctgcacgtgggacgaaggaattgttcagcaggccgcggcagatacggcatccgaattacgggcggcgggcattcatgtaaactttagccctatggtggatttagtgcgcgactcacgttggggccgagttatggaatcatttggagaggaccacctcttaagcggcaacttaggccgatcaatgatcagaggctatcagaaagacgaagatggggaattcgcggaaagcggggtagctgcgtgcttgaaacattttgcggcgtatggcgccggtattggcggcaaggactataatgctgtggatatgagttggcgcgaattttatgcctactacggcaaaccctacgaaattgcgcttcaggaaaaaccgaaatttgtaatgtcatcctttaatacctttaacggtgtaccggtctccgccagcgaacagatgatgaaggagatcttacgcggtacatatcagtttgataacatcgtaatcagcgattggggggcagttgcggagctacaaaaccatcgcgttgcaggcaatgacaaagaagcggcagagatggcccttaaagcaggcattgacatcgagatggtgtcgaccctgtatctagagcattacgaacaaattttagaggaaaaccctgcgctgattcaggatatcgatgcggccgtcttgaaaattcttcagttgaaaaacgaaatgggcctgttcgagaatccattcgtgaacgaggcacgcgagaatgaggtgctgatgaacccgcgtttcctggaacacgccaaagatattgcgaagcggacgtgcgtcttactaaagaatgaacagatgctgccgatcagcaaagaatacaaaaaaattattattgtggggccttttgccggttccaaccagttgttagggaactggcgctgcaagggtagctttgacgatgtagtgaccttagccgaagggatgaaacgcgtggatgacagctttgatctgcaggtttatgaatcactgaaagattgccctcaggcagaactggaacagtcagattacattgtggtggcagtgggggaacattgggaactgagtggcgagggacattcgagcgtaaatatcgatctggaagcgagtcagcagcagctgatccgcgaggttaaacagactaacaaaccgtatgcgtgcatttgtttctcgggtcgtccgctggcccttcagaatattattgatgatattccggcgcttctgtggtgttggtatccgggtacccaagcgggtagtgcaatcgcagaattaatcaccggccaggatactccgagtggtaaactgacaatgtcatttccgcgccactcggcgcaagcgcccatatactataacgaatacagcacgggccgcccggccaacgaatcatcatatagctcgcggtatcaggattgcgaaatcgggccactgtttccgtttggtcatggtctgacctataccggtgcgcagtattcagatttcaaaattagccgtcatcacctgaccgcaggcgaagaactgacgattagttttcaggtttccaacccgtccggctacgactattccgagatcaccattttatacatcgaggatctggtttcgaaagcggtacgcccagtccgcgaaatgaaaaaatatcaggttgtaggtgttccggcacatcagaccgtgaatgtgcagatgacgctggcactagacgatcttcagtacctggatacgtcgctgcagcagacggttgagacgggtaagtttaatatctacattaatgatttggatcacccggttttcaccatcgaatatcgctga

SEQ ID NO: 638 - DNA, 1119 bp, Artificial Sequence
  6xHis UPI0002638AF3
atgcaccatcatcatcaccacgagaacttatatttccaaggtagcatgccggatcctgccttaccgtggtgggaacgtgaaccgattatgcgcggtgtcaacttggggggttggttattactagagcgttggatgcagcctagtcttttcgcaggcacggctgcgcgtgatgaatttgaactgtgccacgcttggggacgtgaagcagaaaggcgcctccgagaacatcgcgaatcctacattggtcgggatgatttggtatggctgaaacgagttggcattaacaccgtacgcattccgtttgggtactggctactgacaggtgatccgccgtttgttgcaggcatcgacgtattggaccaggcgctgcgctggtgtcaggatctgggcctgatggtaatactggattttcacggcttgcctggcgcccagtcccgtgaacatcataccggtcgtgcaaatcatttccagtggcaccgtgatccagatcatcaacgtcgctctctggagatcttagaaagcattgcagcacgctacaccgatgtgtctagcctgatcggaattgaagtggtgaacgagccggccgaatctattccagcgacacttctcgatcgttactaccgtgcagcatacgaacgtattcgccgccatcttccgcctgagcgtgccgcaattattttccctgcatttaccgaacgtcgtctgcgtcactttcacggtcgttaccgcccgccggcgttcgaaaacatcattaccgaccttcactattatcaatgttttggcgggtggccgagcgccatgacgtgggacgagcagattacatatccgctgacccatcgcctccctgaaattaagcgcgccaatgaacgtggctggcttatgattggtgaatggagtttgcgtctcccgtggaaaccgcgagattggactcgtgaactgcccccggcaggctacgataccgtaatgcggggatatgcggctgcacagttatgggcgtatgaacagacccgcggctggtgtttctggacctataaagccgaaggcgaaccagaatggtcgtttcgtgactgcattgaacgcggttggctgcctaccccggtggacgcaggtatgggctga

SEQ ID NO: 639 - DNA, 2595 bp, Artificial Sequence
  6xHis UPI000392C3ED
atgcaccatcaccaccatcatgagaacctgtatttccagggcagcatgaccaaagtgaccattataaacccggaagccgtactcaaagagcttagcagcgaggaaaagattgcgctgttaagcggcgacgatatgtggcataccgtagcagtgcctcgcttgggcgtcccgcgcgtacgctgttctgacggcccaaacggtgtccgcggtactgcttggaccaatggcgcgcctgcgagctgtttcccctcatcgaccggcctgggcgcatctatggatgtggacttagttcgccgcatcggggaagccttaggtgaagaatgccgcgcacgtggtgttcactgccttctgggaccgacgacgaactgccagcgccacccgtgcggaggtcgcggcttcgaaagttttagcgaagatccccatctctgcggccatattgcattggcatggatcgaaggagtgcagagcaaaaaagttatgattacacctaaacactttctagcaaatgagcaggaatacctgcgtcgcagcaacaattctgtgattgatgagcgtacaatgcacgaaatttatctagagccgtttcgcattcagtgtaaggcacgcccggccgtgtttatgaccagctataatcgcgtgaacggccttcatgccgcagagcacccgttcctacttcgcaaaatcctgaggggggactttgaatttcagggtatgattatgtccgattggagcggtacctactcaagttcagaggccgttaaagcgtccctggatctggaaatgccgggtccagctctgatgcgtggatcttcattggaacgcgacattataggaggtaagctagtgcccgcggatattgacgagtgcgccttgcgcgtgttacgttatgttcaagaagcccaacagagcggaattgactttgagaaagacgaagaaacaattgatactccctatatccgggcacttctaagagaggccgctgacagcgcggttgtgctgctgaaaaacgataaaggcatcctgcctatttcattccccaatgggaaaaaaattgcagtcattggcccgagtgcgaagacggctagctatgccggcggtggttctgcaaaccttgccccgacctaccttgttaccccactagaggccattactactctggcgagccgcgtaggggcgcgtgtggaatacacggtgggttcagatagttcacgttggacgcccttacttacccccttcatccatcacccaactatgggtaaggatgcgggccctggcgtacagtgcgatttttatgtgcagaatccgtgggaaaacaaagtgaagcctatcttcagcaagtataataacagtgcgttttcatacttcattgatggcattccgaaagaggtgcccatccgcggctacgtgagcctgaaagccatttttacacccgacgaaagcggcatttgggaactgggcttaggcgtggccggtcaagcggacttgtttatcgacggcaagaaaatcgtcgacaacagtactgatcagaaggaaggtcttctgttctttaacaccggcgcggaagaacgtactggcgaacttaacgtggaagccggtaagagctacgacttggaagtgcggttcagcaactttaagcaactcaatgcaatgagcccgtacactggtcgccgtggtggtattcgcataggtggtcgaaaaaaacgggatgctcatgcggagatcgaaaaagcagtcaagctcgcgaccgaatccgatatcgtgattctgtgcattggtacgaatagcgagtgggaaagcgaagcttatgaccgcgatgacatgaaacttcctcctggcactgatgaattggctcgtgccatactgtcgtcaaaacctgaaaccatcgtagtgaaccagtcagggatgccggtagaattcccgtggctggacgatgcttctgctattgtgcaggcgttttttggcggcaatgaatgtgggaccgcagtggctgatgcagtatttggaattgttaatccctcgggcaaattacctatcacctggccgcgcgtcctggaagactatagttcgcacgaaggatttggccatccgatcaacacggtatatagcgaaggccttggcgtgggctaccgctactttgatcgcggtaaccatccgaaaagcgcattcccttttggccacggtctgagctataccagttttaccctgtccgagctagcggtcaatcccgaagcgtttggtgctaaagcaacctttacaattaccaacactggtgaaattgacggcgccgaggttgcccaagtctatatccatgatctcgcgccgatcgtcgaacgtcctgaacacgaattagcaggcttcgttaaagtacatctccggccgggtgaatcaaaggtcgtgagtgtcaaactcgaccataaggcattcagcttctatagtgtccaagagaaatgttgggtgggccgcatgggtgattatgaaattcgtattggcaccagtagcaccctcattcacctgagcaaaccggtccatctggcgcgtagcttcaaatggataggtctgcaggaaccccaggtgtacgaaccggcgtggatttga

SEQ ID NO: 640 - DNA, 2460 bp, Artificial Sequence
  6xHis UPI0002988588
atgcaccaccaccaccatcacgaaaacctgtactttcagggctctatgactgagcttacggacctgccacagtacctgttgattcgtttactcagcggtgctgatgactggaggaccgttgctgccggcgaagttggtgtgcgtagtttgcacttgagtgacggcccacatggtctgcgagtgccggatgtaaagggcggtagcttaccagcaacttgttttccaaccgcggtcacgttgggcgcgtcttgggaccgagatctggcagaagaagtaggcggagcgctggcggtagaagccggtgcgttaggtgttgatgttgtactcggccccggtatgaatattaaacgtcacccgctaggtggacgcaattttgaatatctgagcgaggatccggtggtgagcggcgaactggcagcagccatggtgcgtggtattcagggtcgtggtgtggctgcatgtgtaaaacatttcgccgtaaacaaccaagaaaccatgcgcttatgtgtcgacgctgtggtagacgaacgcacactgcacgagatctatctcgcggcgttcgaaacggtcgttcgtaccgctcgtccggcagctgttatggccagctataacgaaatcaatggaaccgcggcaacgaccaatcgtagtctgattaccgaagttctccgcggccgctgggggtttgatggtctggttatgagcgattggggggccgtgtgggatcgcgtggcagccctggaagcaggcttggatctggaaatgccgagttctgccggtgcatttgatcgctcagtggcggctgctctggatagcggccggttaggtctggatgcggtgctaaccagcgtctctcgcctggtgggtctgcagaatcgtattagcccgccgcgcattgataggattccggcggacgagcacgatgccctcgcgcgacgtgcggcgactgccggtaccgtactggcggccaatgatgggattctgccattagccgctggttcgaaggtcgctgtgattggggctttcgcggcccgtcctcgctatcaaggcagcggatccagccaggtaaacccgacccgtgttaccggtttgctcgaagctttaggcgccaaagacgttgaagtggggtatgcacgcggatacgatccggaagaacagcgtaccgatgcagtattggttgcagaagctgccgaacttgcagcggcatccgacgttgctgttgtcgtgaccggcccgccagaagaattagaatccgaaggatatgaccgtacaggcatggatttacctgctcagcatgacgccctcgtccgcgcggtgttggcggcaaatcctcgcactgtaattgttgtatgttcgggctcaccagtagcactgccttgggcggatagggcggcggcagtggtgcttgcgggcctgggaggtcaggcaggtggcggcgccttagctgatgtgttggtgggggatgcggaaccgggaggccgcctggcggaaacctggccccatgatctctcagaagtcgcaagtgacccttggttccctgggacgggggcaatggttcagtatcgcgaaggaagtgcaatcggatatcgccatacggccaccaatggtgtcgaaccggctttttgctttggtcacggtttatcgtatacccgttttgattggcgcgacgccgttttaacggagccgtggatagtcgcgggagatggcttgtccgttgacgtggaggtagcgaatgtcggggatcgagcggggtcagatgtggttcaggtctacctttcagatcgcacaggcgtagtctcacgcccgcgccgttggctggcaggttttgcaaaggtccgtttagaagcgggccagtctcgtcgcgtgcaggttgccgtgggtgcgcgtgaactgggcttctgggatgtcgaaaaacacgattgggtggtgcctagcggccatttcgatgtggaactgggtcgttccgcacacgatatcgttgccactttggatttggtagtgtctgaaggtgccgaccacgctccagaacgcgcgtggacaccgctcatcgcagaagatgacgaagctttcgctgcgcgtctgggacatgaaatcccgcgaccggcggccaccaccccgttcactgcacgttcaactctgggtcaggtgcgtcatacccccttaggtggtttattacacgccgccgcgatgcgccgtcttgcagccggcgtccgcgatccgcgcttccgtcgcatgatggaacatactgtagatgaactgccccttcgcaacttaccgtcaatgaccaagggcctcgtgccgctggagagcgtgagtctgatagttgatgtactgaatggagccccggatgagattctccggcgctcatttggtggcgcactgggccttggccgaggtgtcgttgatgctggtcgtggcctgtggggagaactgagctctaggattggacgtctcggccgttga

SEQ ID NO: 641 - DNA, 2331 bp, Artificial Sequence
  6xHis UPI0001B93465
atgcaccatcatcatcatcatgagaacctgtacttccaggggtcgatgatgaacctgcaactgcaaatccgtcgtgcaacaatgcttggcatgctgctcctggggattgctattaccactaatgcacaacgtcagagaagcaaagctgtaaaaaaacaggtaccgattcttggccgtcatgtaatgacaactgccgaagacctcttcgtcgcagacttgctgcgcaagatgacactggaggagaaagttggacaactgtcacagtacgtgggcggtagcttattaacgggtcctaagagtggcgcacttagcgactctcttatggcccgcggaatggtcggctctatactgaatgttggtggtgtggataatcttcgcaaactgcaagaaaagaatatgcggctgagccgcctgaaaattccactcatcttcggatttgacgtagtacatggctacaaaaccattttcccgacgccccttgcggagtcctgcagctgggacctggatttaatgtatcggaccgcgaaagcggcggcaattgaagctagtgcatcgggtatccattggacttttgccccgatggtggatctagcacgcgatccgcgctggggtcgtattgtggagggtgcgggtgaagatcccttctttggctgcaaagtcgccgaagcacgtgtgaaaggtttccagtggaacctgggcaagcctaacagcgtactggcgtgcgctaaacattttgcggcatacggtgcaccacaggcgggacgcgattatgccccggtagacattagccccgcaacccttgcagaaatgtaccttccaccgttcaaagcctgcattgatgcgggtgtacaaacgtttatgtcggccttcaacgatttaaacggcgaacctgcgaccgggagccattggctgttaacggacttattacgaaatcagtgggcgttcaaagggttcgtggtcagcgattggaacgcggtcgtgcagcttaaagcacagggggtggttgaaaatgaccgcgatgcagctattatggcattaaaagcgggcgtagatatggacatggtagatggcctgtacaatgcacatatcgctgatgcggttcgtaaaggactgataagcgaatttaccgtgaatacagctgtggaacgaattctccgccagaaatatcgactgggactgtttgataatccgtatgcatttctcgataatgcccgtgaacagcagacggtacgtagcgcagagctaatggcgcttgcgcgcgaagccgccacaaaatctatggtgctgttgaagaacgaaggaggtgtgctcccgctgtcaaaacaagtaaggcggattgccgtaattggccctctggccgataatcaagcggaagttctgggctcttggaaagcccgaggcgaagacgcggacgtggtgacggtggtaaagggtctgcgcaacaaactgggcacgaacgcgaatgtcgtgtatgtacgcgggtgtgattttcttgacacgaagaataatgaatttgcgaaagcacgtcaagcagccgcaaatgccgatgttgtgatcgcagttgttggcgaaaaagccttaatgagcggtgaaagccgtagccgcgcttttctgagcctcccaggtttgcagcagcagttgatcgataccttgaaaagtacgggaaaaccactggtgaccgttttgatgaatggccgcccgctgacgcttgcccgcgtggcggaacagtcagatgccctcttagaagcgtggtttccgggtactcaatgtggtaatgccgtggctgatgtcctgtttggcgatgtcaacccatccggcaaactgactgtgagcttcccttatgccgaagggcagattcctaactactacaattatcgccgtagcggacgcccaggcgatatggaacagaccagcactgtgaggcatattgatttaaaaaaccgtaacctgtatccgtttggttttggactgtcctacactactttcgagtacggcgccatcgaatgtgcctctcattttgacgccaatggacgtctgaaggtaagcgttgaagttaaaaataccggtgatcgcgacggcgaagaaattgtgcaattgtatgtggcagacaaagttgcaagcatggtacgcccggtcaaagaactgaaaggcttcaaaaaagtcatgattcgccgaggggagactcagcgcgtcgattttgaactgcgcgtccatgatcttggcttctatacaaacacgatgaaatacgttgtggaacccggcgaatttgatatcatggttggtccgaattctgaacaactgaacggcaagaccgtggtttggaataagtga

SEQ ID NO: 642 - DNA, 2391 bp, Artificial Sequence
  6xHis UPI0001D08095
atgcaccaccaccatcaccacgaaaatctgtatttccagggctcgatgcggaaatcctcggaagataaaggttttctggatgatctgctgagccgcatgagcctggccgacaaaatcggccagttaaactttccacatgctgccggcctgccgacgacgggcgcggctgaaggtgcagataccgaaaccctgatccgtcgggggcacctgtgtggcacctctgccggcgcgaatatcgcagagcgtcgtgtgctgcagagaatggcactggaagaaagtccgcacggcattccgctgttctttgcacgggactgcctccagcgatatatcacgtgtggtccaatccctctggcgttaagctgttcgtgggatctggatctcattagtagaattgcacagatgaccgctcgtgaagcacgtgcggatggggtgtcactgacctgggcaccgatgcttgatattagctacgatgcacgctggggccgcattgctgaaggacatggcgaattaccccacttgtgcgcagctatcgcccaagcaatcgtgacgggctatcagggcgcggatggcgatatggcgcgtccagaccgtatgatggccactttaaaacacttcgccggttacggactgagcattgcgggccgtgattacgcggccgtcgaagcctctcctgctacgcttatgcgcatcatggaaccgtttaagtcaggcgtggccgcaggcgcgggcgctgttatggtggccttttcagcgatcaatgatatcccggccaccgctcatcgcgtactgctgcaggacatactgcgtgaccggtttggttttgaaggcatgattgttactgattttacggccattgatccggaattaatccatcatggcattgccgccgacgctcgtgcagccgcatatctcgcctttaaagcgggcgtggcagtggatctggtctctggcgccttcttacaccatttggcagccctggtggaggaaggcagaagcgccccggatgcacgtccgtggggtcccgttaccgaagcagaaatcacagcccgctgtcgccaggtcctccgggccaaggaacgccttggtctgtttgcggaccctttcatgggtttagacgaagatctgcgtgccaaggtggttcgttgcccggaccatattgctttagtgcgagaagcggcggccaagagcctagtgttgttgaaaaacaccggcgtgctgcctttagcgcgcgggaaaaaacttgcgctgattggcccgcttgccgaagatcgtattgacatgcagggatcatgggcgattgatgtaaaccctatggatagtgtcaccatcgcagaaggcctgactgctgttgcgggtccggatacccgcgttctgatcgcgaagggttgcagcattgtagaagatccggcattggctgcgcgcctgaacgtacataatcgtgctatgccgagcgtcccgccggaaagccgtagcctggaagccatgttagcggaggcccacacgctggcggcgacggcggatgctattattttagcgttaggcgaggctaaggaacatagcggggaatcgtcgacccgtgtggacatcacactgccaggcgctcaaccgcgtttagttcgcgaaatggcgcaagtggcaaaagaccgtggaattccccttattcttttggtgattagcgggcgccctctggcccttacggaagaggctgcacttagcgacgcattgatctggactggccatccgggagccgaaggcggtccggccattgcagaaattctgtttggcgaccgagcaccggagggtcgcttgtcaatttcgctcccacgtcacgtaggtcaactgccgttacgtattgaggatctaccgtcaggtcggccgcaagatggcataggtgtggatgtgtatggtgattcggaaattgatgcgactggacgtcatgtcttccgcaaattcacgacggcgtgtattttggagagtccacatacgcctctttacccggccggtttcggcctgggatatacaagttttgcgcatggccagccgcaactgagtgccaccgaactccaaggagcggcggccgtattagacgtgaccttagatatcaccaatacgggcactcgtgcgggcaccgaaacggtgcagctgtatctacgggatccggtagccgaaattagtcgcccattgcgagaactcaaaggatttgctaggttgaccttagccccgggagaaaccggtactgcacgttttcagattactgcggctgatctcgaatatgatcgaggcccggatttagcccagatgcgtcgtgattgggaaggtggggcgtttcgactgaatattgggccacatgccttggatacgcaggaaatttcaatccgatggaccaagtga

SEQ ID NO: 643 - DNA, 2337 bp, Artificial Sequence
  6xHis UPI0001E74370
atgcatcaccaccaccaccatgagaatttatattttcagggttcaatggagctgcggaatgggaatcaaggtcaaggtggtatacacttgacgagcggagggaacggcaccattcgtccggctccaagcaacccacagctcgcgggaactaccttacaccgccgtgtggaaactctgcttgcccaaatgaccttagaagagaaagctggacagttggcacagtactcggtgggtaccccgaccggtcctggcacgggccgtaacgactacgaaacactggttcgcacgggtgcggccggctcactgctgaacgtggttggtgcgcaagaaaccaatcgttaccagcgaatagcggttgaacagagcaggcttaaagttcccctgctgttcggctttgacgtaattcatggatatcgcaccacatttcccatcccgttgggcatggcagcctcttttgatacggcattagtagaacagtcaatgagattggccgcgtcagaagcagccgcagaaggcattcgttgggccttttctccaatggttgatatagcgcgtgatgcacgctggggtcgtgtggcggaaagtagcggtgaagatcctcatttaggtagcgcgatggcgcgcgcgtatgttcgcgggtaccaaggcccgagcctatcagaacccacgagcgttgccgcatctgtcaaacatttcgccggctatggcgcggccgagggcggacgtgactataataccgttgatatgagcgacgtgagcttgcgccaaatttatcttccgccatttcaggccgcggtagaagagggtgccgccacgttgatgagcgcgtttcatagccacaatggagtgcctgcgacagccaatggctatttaatgacccgcattctgcgcgaagagtggggttttaacggatttgtagtgtcagactggaccgcagttgccgagttagtgaatcatggaatagcactggatggcccggcggctgcgctgaaagcgttaacggctggtgttgaaatggatatggaaagtcacctgtatgggcctgaggttccgcggatggtacgcgagggccgtctatcacaggccgtggttgatgaagccgtgcgtcgtgtgctgagagtaaaatttgccttaggcctgttcgagcatccttttgtggatgaaaaagcggcggcatatgttgcaaccccgcagaaacgcgaattggcccgtcgcatggctgaagccagttttgtactcctgaaaaacgaaggtggtgtgctgccgctgcccccttcgggccgcaaaatggccctggtaggcccgcttgctgatgctgcagccggcatgctaggcatttggagtgctaaaggcgcaccgcaagatgtggttacattacgtgctgcgttagaacgccgtctgaaagataccggtacgttgcgttgtgcgcaggggacgggcgtgctgtcggaagagacctctggcttccaggacgccgtggccgcagccaccgcagcagatgttgttattgccgcgatgggcgaggacgaaacgttaagcggtgaggcaggttcccgtaccagcattgagctgcctggaaaccagcgccaactactggaagcgctggcagcgaccggaaaaccgctgattctgattgtatttagcggtcgtccgttagccctgaccgatgtgcaggcgcatgccagcgcaattgttcaggcgtggcaaccaggcattgaagcaggtccggccttagtcaacctgttatggggtgaagtcaacttttcgggacgtctcccggtgacctttcctcgcagtacggggcaagtcccactgtactataaccatctcaacaccggacgcccggcaggtaaaacagatttaacacgacctccctcatgtccggccgaaaaatatgtttcacgctatctggacgaacgcaacactccgctttacccgtttggccatggtttgtcatacacaaccttcgattttgccccgccaaccttatctgcgtcagcactgaccgcccgtgaagtacagaaacaggcgaaggacgtacttcgcgtgaaaacccgcgttcgcaataccggcaaagtacacggcactgtggttgcgcaactgtatcttcgtattctcggcgcttctacagcccaacccgttcgccagctagcaggtttccagcggattgcattagcgccgggagaaagccgtgagcttgaattcaccctgggctttcaggaactcagcttctttgatacccgttcagtgcgtggcgtggaatcgcatactcgctatgatgtgtgggtgggggattcaagcgaagctacacagcataccagtttcatgatggaatga

SEQ ID NO: 644 - DNA, 1374 bp, Artificial Sequence
  6xHis UPI0002010060
atgcaccatcaccatcatcacgaaaacctgtattttcagggctcaatgcagaacatcgtgtttgataaagattttctgtggggctgcgccaccgcgtcatatcaggtagaaggagccattgaagaagatggtcgcaaaccgtctatctgggacaccttttgtagtcaggacggcactattatgaacggcgatgacggcagcattgcggcggaccagtatcaccgctataaggaggacgtgcagctgatgtcggatctgaatttccaggcgtatcgtttctccattgcctggccacgtattctgccggaaggtcgcggtaccgtaaaccaaaaagggcttgaatactatatcaacctgtcacaggaactccactcgaaaggcattaaagttgtggcgactctgtatcattgggatctgccgcaggtgttacaggatgaaggcggttgggcagtaagaagtaccgcctatgcgtttgctgaatatgcgaaggtttgctttgaagcgctggggccgtatgttgatcagtggatcacgttgaatgaaccgttttgcacagcatatctgggctatctgcagggcattcatgcgcctggtattaagaaccctcagcaggcctataatgcggtgcattatcttaaccttgcgcatggcttagcgattctggaatatcgtaagagcggtcttaaagcgcaaattgggactacattaaatccgagtctgcctcgccccgcatcacgtaaagcggaagatgttagggcagcgcgctacgctcgcgcgatctttacagatgtgttcctgcttcccctggtgggcaagggttacccggttgaggtgacgcaggatatgcacatttctttcccgattcagagtggggacatgcagattatcgcgcagccgattgattttatcggaatcaattactacatggagcgcgccgtagtattggacgaatcggacttatttttacatcgcgaggtcccgagttggcaacgcacgacaaatcaggattggcctattgtaccttacggtctgctgcgcatcctgaaatacttcgataccgtgactaacggcctggcactgtatatcactgaaaatgggtgcgcgtcagatgatgagttggtggaaggccgtgtgcatgatcatttccgctgtgattacatcaacgaacatttagcagcatgtaaacaggcgatcgacgaaggtgtgaatctgaaaggctacttcgtgtggagctttatggataactttgaatgggcgtgggggtacagccgtcgttttggcattatttatgtggattacgaaagccaggaacgcttcccgaaagactcagcctacatgatgcgtgacattattagcggctactgcgaatactga

SEQ ID NO: 645 - DNA, 1395 bp, Artificial Sequence
  6xHis UPI000207D78C
atgcatcatcatcaccaccatgaaaatctgtactttcaaggcagtatggcatttacctttccggatgatttcgaacttggcgttgcaagcgctgccacccaaattgaaggcggagatacggcaaacagctggtatgattggtatgcgactggtcatattccggacggctcagatccgtccgttgcgactcgccactatgaactgtatgaagaggatgcgcgcctgatggaaagtatgggtatccgtcattaccgcatgggcctggagtgggcgcgtttagaaccggaagaaggtgtgtttaacgaagaagtcttcacccactatcgcgatgaaattcagctgcttcagtcaatgggcattgaaatcctactgacccttcatcatttcacaaccccactttggtttgaaaagctgggcagtttcgaaaatcccaaaagtgtcgagatctttcttagctttgttaaaaaagtgattgaggaactgggggatcttgtgagccagtatattacaattaatgagccgaacgtctatgtcagtcacggttggtttctaggagcctggccgccgggtaaaaagagcatgaaagcagccttccgagtgatgaccaccttatgcgtgtgtcacatccgtgcgtataccctgattcatgatatgcgccgttgcaatggctatgatgatacaatggtgagctatgcccaccacatgcgcagttttgtaccgctgaaacgctacaatcctatccatctgatcatgaccccgctattccaccgaatttttcagtcttctatttcgcgcagcttcctgaccggtgcgagtagttggcctattggcaggatgaaaggcatccgaaaaggcctgtactgcgattttcacgccgtaaactactattcacgtaccgcggtttccggtttatcggatggtaccctgccgcatgtccctgtaaacgatttgggctgggaaatttatcctgagggcatcgtgaaaaacacgcaagaactctttcgtctcgcaaacttgccgatttatatcaccgaaaacggcacgtgcgataacgaggacagctttcgcaaccgctatatctcggaacacctgaaaatgctgtgtgaaagcggcctgccggtgaaacgttactatcattggtgcttcaccgataacttcgagtggctcgaaggtgtatcggcgaggtttggcttagtggcagtagactatgcgacccagaaacggatcatcaaaaaaagcggtgaattctatatccgcatgattgccgaaaaaggtattagcgaaaacctggaaaaagaatactgcaagcaggcctatcgtctggataccgcccatgttactgcagccccggatgcgacggagaagcagaaaaaacaggaaaagaaacatgagtga

SEQ ID NO: 646 - DNA, 2715 bp, Artificial Sequence
  6xHis UPI00020EFBCB
atgcatcaccatcaccaccacgagaacctatattttcaaggctccatggttttccctgtggccatctcgccggttagtgttgccgctcaggaagcgggcagtatgactggtattagtccggtgcgtgcaaaagcgcgtgctatggcggcggacttagtcgcaaaaatgacattagatgaaaaacttggccagctactgaacactgctcctgcgattccgcgactggatattccagcctacaactggtggaccgaaagtctgcatggggccttaggcagtctcccgaccacgaattttccggaacctattgggttagccgccaccttcgacgctagcctggtgaaagatgtcgcaggtgcgatttcaacggaagttcgtgggttacatgcactggcccgcaagacaggtcgcatgggtcgcatcggtaccgggcttgatacctggtcgcctaatattaacatttttcgtgatccgcgctggggccgtggccaggagacctatggtgaagacccttatctaaccgctcgtatgggcgttagctttgtcgaaggcatgcagggcccggatcccgatcttccagatgtgattgcgaccccaaaacacttcgcagtacataacggccctgagagcacccgccatcatgcaaatgtctttgtgtcccgtcatgatttagaggatacatatttgccggcgtttcgagctgcaatcgtggaaggccgcgcgggtagcgtgatgtgcgcatacaaccgcgttgatggacagcctgcctgcgcctcacaggaacttctccaagaacacttagtggatgcgtggggttttcagggttatgtggtgagcgactgtgatgccgttaaagacatctcggataatcataaatacgcccccgatggggcagcggcggtcgcggccgcaatgcgtatgggtgttgacagtgaatgtcacacttggaccctctcggacaccgatggattaacggatcgatatagggaagccttggaacgcggcttaatcaccgtcagcgatgttgatcgtacgctcattcgtctgttctccgcacgcctccgtaacggtgatctaccaggagtgcgcaaactctcgacctttacctcgagcgctgcagacgtcggaacacctgcacatggcgcgttggcgctgaaagccgcggaagaatccctggtacttctcaagaatgacggcattctcccgttccagactgccggcatgaaagtagcggtgattggcccgtttggtgatgctacgcgagtgttacgcgggaattacagctcgaccatttctgcaccgcctatttcagtggtggatggcttgcgccaagcgatgcccaaagccacggttagctacgtgccgttcggtgaaaccgtaactgatggcgatccggtcccggagagcgccctcgtgtcggacgatggcaagcctggattgacggcccgctactacaacgttcagggtaccccgccgaaattgttcgaccctggcaaacgcgacgaatatctgaaaacggttaaattcagtgaaaagccagttgtgacccgtagagaacgtagcgtagatgggcgcagcctagatctggcacaagtgtccgaccaccatcgggttgtgtggacaggctatctggtaccccccgagtcgggcacttatcgcttgggcttaagcggcttccaatccggccgtatggattttgatggtaagccgttcgtcgaccttaaagacgcgcaatggggttcgttaccgacgatgaaaacactgacgttggaaaaaggccatcgatatcctgttcgcattataggcgaggcacacaccggaacggcaggcatcggctttgcatggaaaaggatctcgacagatccggcaggcgacatgcgccgggcagcacaagcggccgatgtgctggttgccgtggttggtctgacctcggatcttgaagcggaggaatctccaattgagattccgggattcaaaggcggcgacaaaaccaccctggacattccggccgatcagcaggaactgctcgaacaggctaaggcgaccggaaaacctcttatcgtggtcgctatgaatggtagcccaatcaatctgcactgggcgaaggaaaatgcggatgctatcctggaagcgtggtatccaggtcagagtggtggtcttgcgatcgcgaacgttttgacaggaaaggccaacccgaccggcaagttaccactgaccttctaccgcagcgtagaagatctgccgccgtttgatgattacgatatgaagggccgtacctaccgttatttcacgggtaaggcggtgtatccttttggctatggtctgagctacactacctttggttatggccccgtagcagtggaacctgcttcaggtggtgcgcaagatggaatccgagtgactacgcaagtgtcaaacacaggtcagcgcgccggcggcgatgcggttcagctgtatttggacttcccggacgccccaggcactcccaacatcgccctgcgtggtttccagaaagtatcgctgcagccgggcgaaacccgtcaggttacgtttacactgtctccacgcgacttgagcagcgttactccggatggcgttcgtaaagttttaaaaggtcactaccgcgttaccgttgggtcgggacaaccgggatttagcgcagcaacacgttcggctgatttttcggttgaaaaggccgttacccttcctaaatga

SEQ ID NO: 647 - DNA, 2613 bp, Artificial Sequence
  6xHis UPI000225331F
atgcatcaccatcaccaccacgaaaacctctattttcagggttctatggacgccacaacgctgaaggaaattgaagaaaccctagcgcagttaacgttagaagaaaaaataagcctgctggccggtaaagatttttggcgtaccgtgccgctgccggaaaaacagatcccctctatcaaagtctcggatggtccgagcggtgcgcgcggagatactttcagcggcggccagaaagcggccttcttcccaagcggcatcctgatgggcgccacattcaatccggaactggcgtacgaaacgggagagttactgagtgaagaagtgcgggcgaaaagtgctagtgtcctgttggcaccgacagcctgttgtcaccgttctccgttaggtggccgcaacttcgaaagctatagcgaagatccgctgctaagtggcaaaatggcatcgggttacatccgtggtgttcagtctagaggcattgcggcgaccatgaagcacttcgtcgcgaatgaacaggagacatggcgtctgtacgttgatgaaacgatcgacgaaaccacgctgcgcgaaatctaccttaaacccttcgaaatcgccatgcgtgagggtcagccgtgggccattatgactgcatacaacatcataaatggtgtccactgcgactcacaccccctgactttgaagcaagtcttgcgtggtgaatggaactatgaagggttagtaatgtcggattggtttggttgtaactcgatggtggaaagtttacttgcgggcttggatcttgaaatgcccggtcctgcccgtaagcgccccattaaagagttcgtggaagcagccgaaaaggatgagagcgttcgtaaggccattgatgattcagcgcgccgtattctgaccctgattgcaaaagtcgggaaatggaaagatatgaccccggaagccccggagtatagccgtaacgacccggaaaccggcaaactgattcgacgtgcaggtggcgaaggtaccgtattgttgaaaaacgagggaaaaacgttaccgcttcagccgggcagtctgaaaaaggtagccttcattggtcccaacgcaaaagcaaccgttgcgggcggaggcggttcggcgaacctggaaccaaattatctcacccagccgtatgaaacctttgtgactgcgattaaagaaattaacggcgatattgaagtaccgtgggtccaaggttgtatcatagatcgctgggtccccaatattgatgtggaaggcggcttctgtcgtgtgggtggccccgattcggaagcgggcctgtttcttgagtggttccggggctatgaagctactggcgagccggtcgccactaccgtttttaagacatcgaatgcatttctttgggactctcgcccgacctccatcagtccttcagaagaattttccgtgcgcttctcaggacagataagtgttccagaggatggcaaatataacatatcgttaagcaccataactgcgagcaaattatatctgaatggggaactgctgatcgataactgggactttaaagaacggggcaatttaatgatgaacgtaggttcggaggaggtagtaaaaaccattgagcttaaaaaaggcgaatggtatccgattctggtgcataatagtagcatttggcctaaagacagcccgcgtgacccgccgatggaagaaattggcgcgctcggcattcgtctcggcgttgcaccggtttacgataatgctgttctgattgccgaggcggcggatgctgtcaaagatgccgacgcagtcgttattgtggtaggccttaataatgaatgggagtcggaatcctatgatcgaagcgatacgaaactgcctaacaaccaggatgatctgattgaagaaatcgctaaagttaatcaaaacgtcatcgtggtgaaccagtcgggtgcgccggtggatatgccatgggcggaaaatagcaacgtgaaggcgattgtacaggcctggtacgccggacaagaagcaggtcatgttattgcggatgtgctgctgggcaaacagaatccgtcgggcaaattacctctgacttttccgataaaagtgcaagataacccgagttacttgtattttcctggccgcgatcagaaagtggaatacaccgaaaaactgatggtgggataccgatactacgacactgaaaatgttcagacgcgtttcccgttcggttatgggctcagttactcgactttctcgattggtgagccgagcttgagcacagctgaactcaccgaaggccagacgtttacagcgaatgtcgatgtttccaacaccagtaacgtggccggcgcggaagtcgtgcaactgtatgtgaaacgtccggcgagcacgtctagtattaaacgtcccgtaaaagagctgaaaggcttcaaaaaagttcatctgggcaccggcgagacggcgacagcaaacattacggtggatgacaaatcactgggtatctggtcaacggaggccggcaaatgggttgtcgaagctggcgattacgaagtattgattgggacatcgtcagttcaggatgaattaaaaccggcgggcaagattactgttaaagcggcgtggagctggatttga

SEQ ID NO: 648 - DNA, 1407 bp, Artificial Sequence
  6xHis UPI00000C6907
atgcaccaccatcaccatcatgaaaatctctatttccagggcagtatggagaacaagatgccgaaggatttcttttgggggaatagcactagcagtatgcaaacagagggcggttggaatgaaggcggtaaaggtccgagtgtttacgacgtgaatacggtaggtcgctcagcgaaagactggcaagtgaccaacgacaactatcatcactacagccaggatctggacctgatgaaggagatgaacatgaatatgtaccgcttccagatttcgtggtcacgaattgtgccggatggagacggagagtttaatgaggaaggcattgcgttctataatcgtttgattgacgatctgttggcgcgcggcattgaaccgatgatctgtctttaccacttcgatatgccgctgaacctggctgagaaatacaatggattcctgtcgcgaaaagtcaaagaagcctttgttcggtttggccaggaaatgatgaaacgcttcgccgataaggtgaagtactggatcgtcttcaacgaacacaacttatacttcgcggatgggtttgagcattatagtggcgtgctgaaaaaagaactgaccctctcagatatgtatacggtcttccaccataccatgctggcacactgtgaactgacgcagtttctgcacgaaaactttgaggccaaaatcggcggcatgttagcgaccacggaaatttacccagcgactttcagcccgaaagataatctgtacttacgaaaatttgacgagttctacaatcgtaacctgtgcgacgtttacgcgttcggtcattactctcacgaggtgatgacctacgtgaaaaaccagaacattcagatggatttccagaaaggcgacgaggagattctgaaaaacggcatttctgatttcatctcattctcgtactatcggagcatcctgctagatgcgtcgcagctgacagaaaatgatgcgccgaacagctatttgaccaaaggcatgaagctgaatcctctactggaacataatcagtgggattggagcattgacccggaaggctttcgtcgtatcctgagccgtttatacaatgaatttggcctgcctgtatttccgatcgaaaatggcatcggccagtctgagatttgggatgggaagacgaagattgcggatgacctgcgtatctcttaccatcagaaacacctggaagcgatgaagaaggcgatcttcacggacggcgttgaagtgatgggctacctgggttgggggctgattgatatcccggcgtcgtcaggcgctatcgataaacgttatggcgccgtgtatgtggattcaaaaagccacaaacgcattccgaaaaaaagcttccattggtttaagaacgtgttcgcctcgaatggcgatcatctggattga

SEQ ID NO: 649 - DNA, 2277 bp, Artificial Sequence
  6xHis UPI000255313A
atgcatcaccaccatcaccatgagaatctgtatttccagggctcaatgaccaactttatcgacgaacttatgtcgaaaatgtcgctgaaagaaaaattgggacagttaaacctccttaccagtaatgtccctatcgaccaaaatcgcgccgatgagattcgtaaaggcaatgttggcggcctactgggcggtttaatagactgctcgtttggtattaacggcccggcccaactgcgcacgatccaggaaattgcagtacacgaaagtcgccttgggattccgctactgctcgcctatgatgtgattcatggccaccagaccgtctttccaattccgctggggctgtcatgctcatgggacatggatcacattgaaacggcggctcgaatcgcagcacgtgaagcttctgcgtcgggtatcaactgggtttttagcccgatggtggatataggtcgcgatccacgctggggtcgtattgccgaaggtagcggcgaagatccgcatctgggctcacagatcgcacgcgctatgattcgtggtcttcaaggaaaagatctgagcagtccggatagcgtaatggcgtgcgtgaaacattttgctggatacggcgcggcggaaggcggccgagattacaataacgcagatatgagctcgtctcgctttcaagatatctatctgccgcccttcctggcggccattgatgcgggcactggtagcgcgatgatgtccttcagcgcgttaaatggagtcccgtctcatgccgaccgtgagcgcttagaacaggtcctgagtggtgttttaaaagtgtcggacttcaatggcattccggagatgattgcgcacggcattggggatgaagaaggacaaattgacgaggcggatccgttacagacgatgtccgaacgtgcgttgcgcgctggtgtccaaatggatatgatgggttacggctttgttacccgtctggaaaaagcactcgccgcgggacgcattagtcagcagcagattgattcagcgtgtagagcggtactgaaagctaaatacaaactgggactgtttgccgcgcctttcgcccgtttcgacgaaaagaaagctgtgcatagcattcttgcacctgattaccgtcatacggcacgcgagattgctggcgactcatgcgtactgctcaaaaacgaaaatgcgcttctgccgctgcctaaatcgggcataaccgtcgcggtcgttggaccgctggcggatgataaaaaaaatgtattagggccgtggagttttcagggtgactctcgtaccgcagttagcgtcttagaaggcattcgcaacgtggcagaagtgaagatgatctacgcgaaaggtagcaacattgtggaagatcgccggatggttgagttactgaactttgcagggcccaaagtggatattgacccacgtgagccggatgaaatgattgccgaggccattcgtgccgcaaatgccagtgacgtggttatcgcagttctgggcgaagccgccgagatgtcaggagaatcagcctcccgcctggacattggaatacctgataatcagcgcacgctgctcaaagcgctgggcaaaacaggcaagccgattgtgctggtgacgatgaatggtcgcccgctgacattgccgtgggaaaaagaccatattccagccattctagtcagctggtttggcgggatggaagccggcaacgctattgcggatattttgtttggcgaacgtaacccgagtgggaaactgagtgctacatggccgtcgcacgtaggtcaggtgccgctgagctactaccatgctaacacaggccgacccggcaatccgaaggaggatccgggcaaatacactacccgatgttacctggacggcagtagtgacccgctattcccgtttggctttggtctgtcctataccagctttgcgtacggccccgtcgaagcggataaaacagtgttgaccggcgatgacgatgttctgactgtgagtatcacggtgaccaatactggtggtcgtgatggtaccgaagtggtgcagatgtacgtgaccgatccggtggcctcagtggtccgccctgtacgtatgcttaagggctttcagaaaatccgtctgcgtgccggcgaaaaaaagacagtaagtttttctataacgacccgcgatatcgaattttgcgatagccggttactgccggtatgggaggccggtaaattcgttattggtattggcacgaacagcaacgagctgaataccgcggaggttgtgtggaacaaatga

SEQ ID NO: 650 - DNA, 2274 bp, Artificial Sequence
  6xHis UPI0002609C68
atgcaccatcatcatcaccacgaaaatctgtattttcaaggatcgatgactgcaacaacacctagtgacccgactgcattgccgcttgaacagaaggtccgtttgttaagtggtcaagatttttggtccacgccagcagtagccgaggctggtctgagcagcgtcgttctcacagatggtccgcatggagtgcgtcgtcagcagggcgagtttgatcagatcggtttattggaaagtgttcctgcaacgtgctttcctccggcggtagcagttggcagctcctgggacccagaggtagcggagcgcattggtgcggcagtcggcgttgaggcgcgcgcgataggcgtcccggtggtcttaggtccgggagtaaacattaaacgttctccgctgtgtggccgtaactttgaatactatagtgaagatccgttgctggcaggtgtgctcggtgcggctcatgtgcgtggccagcaaggggagggcgtgggggccagcgtaaagcattttgccgcgaataatcaagagacccagcgcatgcaggtctctgcggatgtggatgaacgaacgctcagagaagtgtatttgcctgcgtttgaacgcgtggttaccgaatcccgtcctgcgaccgtgatgtgcgcgtataacaaagtgaatggcgtttacgcctcacagcaccgctggctattaaccgaagttctgcgcgaagaatggggcttccgtggggccgttgtaagcgattggggtgcggtcgatgaccgcgttgcggcgctggaggccgggctagatttacagatgcctggcgattcaggcgctggcaacgccctggtcgttgaagcggttcgtgcaggggtgctggacgaagctgttgttgatcgatcggtacgtcgcgtggcagcccttgccggtttagtagcagaacctactgcgggttttgatgtcgaagcccatcatgctctggcccgtgaattagccgccgggtgcgcagtgctgcttaaaaatgacgggggaacgctccctttgaccgctggtacccgcataacagttgtgggggaatttgctcgcacaccacgttttcagggcggcgggagctcccacgttaatgcaacgcgcgtggacgatgcactaacggcgttacaaggggcggttgaggtgacctttgcaccgggatttacgcttgatggtagtggggacgcagcggccctacgtgaagaagcagtggcagctgcacgcggggctgaagttactgttgtattcgcaggcctggccgaagcagatgaatctgagggatttgatcgcactaccctggacttaccggccggccaggtagatctcatccgtgcggtggctgctgtcagcttacgcactgtagttgtgctgagttcgggcagtgttgtttccttagaaggctggcatgatgacgtggatgcagtcttagcaggtttcctgttaggtcaggcagggggaggagcactagcggatctcctgaccggagcggtggacccgtcaggtcgtctggcagaaacaattccgttacgtttacaggacactccgtcctatctcacgttccctggggaacaaggtcatgcacgttatggcgagggcgtgatggtaggttatcgccattacgagacagcggaacagcccgtgcgttaccctttcggtcacggtctgtcttatacttcatttgctaccaccgacttgcaggtacgaacacgcggcgccgatggcgccacagcgactgtgactgtcactaatacgggagagcgcgccggtcgacacgtagtgcaagtgtatgtcgcgaccgctgccgggccggtccgtcgaccggcacgcgaattgcgtgcgttcacgaaagtatcgttagcggcaggtgaaagcgccaccgtcgcttttgaactggatcgccgtgcatttgcatactgggatgtacgtgaacatgattgggtagtagccccgggcgagtactctgtgcagattggcgcaagcgcggcagacgtgctggatcagcgaacggttacgttggctggcgacgatctggtgccagaattaacactacagagctccgtcgctgaatggtttgcgcatccggtagccggaccgcagctattagcgggctttgtcgctgcgatgccagatggagctgcggaaatgcatgaaggcatgttgcagatgattggcagcatgccgatgcgccgttttgcggcggattttgggtcagccgtgccagcggccgagctagatcgacttatggcagccgcacgtgccgccaggtga

SEQ ID NO: 651 - DNA, 2220 bp, Artificial Sequence
  6xHis UPI00028AC337
atgcatcatcaccaccatcatgaaaacctatacttccagggatctatgaccagcgaacaggccgcactcacaagtggagccgatttttggcacacagcgagcacccccccgattaccttaaccgatggtccccacggcgtaaggcttgctggaaccccgggcgacccactgacgggacggcctgcgacttgctttccgccagcagtaactaccggaagcacctgggatccggacttactgcgccgtttgggggaagcgttaggcgatgaggcgcgcagcatgggtgtggcagtcttactgggtccgggagtcaatctgaaacgatctcccctgtgtggccgtaactttgagtacttcagcgaagatccgctgttaaccggagtgctggcaacggcctgggtacgcggtctgcagtcacgcggcgtgggcgcgagcgtgaaacacttcgcggtaaactcgcaagaaaccgatcgcatgacggtaagcgcggacgtggatgagcgtactctgcgcgaattatacttgacggcgtttcagcgtgtggttcgcgaagcccgtccgtggaccgtaatgtgcagttataaccaagttaacggggtgtatgcatctcaaaatcactttctactgactgatgtcttacgaggtgaatggggttttgatggcgtggtggtcagtgattggggtgcagtggtggatcgtgttgccgccgttgcagctggactggatctagctatgccagggcctgatgataccggggatcgcgcgctggttgaagcggttgcgggtggccgacttgcccctgaagcattagcgactgccgcggaccgtgttctgaccttggtacgccgcgccgcggccagacaagcgggtgaatatgatcgtgacgcgcatcacgccctggcacgtgaaatcgcggcaaggggcaccgtattgttgaaaaacgagcgagcggttctgcccctgcccgcggatacgtcagttgccgttctgggcgagtatgctcggacccccaggtatcagggcggcggttcctccgcgatcacacctacccgactggacgtaccgctaacccgcattgcgacggcgacgagtgcaccggtgcggtttgcgccaggctatgggccgccgggtccggacggtacccctgcggaacccgatccggcactgatcgtggaggcagtagcggcagcacgcgaaagtgatgttgcgttagtctttgtgggcacaccagaggagacagaaggacgtgaccgcacatgcctggatttacctgcggcacatgtggatctcattcgccaggtagctgccgcgaatcctcgaacagtcgttgtaatgtgtaacggtggggtcgtgcgaacaaccccgtgggacgcggaacctgccgcagtgctggaatgttggttaccaggtcaagccgcgggttctgcattggccgacgtattattcggacaggttgacccaagcggccgcctggccgaaaccattcctttgaggttagccgatcacccttcgtatttggaccttccggggaccgatggccacctgcgctacggtgagggcattcatgtaggctaccgaggtttcgatgcccgtgaacaagaggttgcctatccgtttggctttggcttaagttacacgacttttgaatacggcacagcgaccgcgacggcagacgataccggcattcgtgtgcgcgtcgaagtcaccaacactggagaccgggacggtcgtgaagtggtacaggcatatgtatcccgccctggtagccgtgttcgccgtgcacctcgcgaactgaaagccttcgcaaacgtgccgattgcagcaggcgcaaccgcggaagtagtgctagatgtcgcacgtgatgatctgggccactgggacgtggccctgggtcgttggcttgtggagggcggtccttggcacgtcagcattggcgcgtcaagccgggatttacgcacaaccgtcgtagtagatgttccgggcgatgaagtgcacgtacctctgactgctggttcgtcgctggctgattggtttgcagatccgcgtggtgcacgtcttctcggggcggcattggcggggcctccgggctctccggccgtcgatcctgccttactcgccattgcagcagcgatgccgctggatcgtctcgcacgcttgttgccgggtggtccgttagatccggctgcggtagcggcgctggtggctgcagcaaattcatga

SEQ ID NO: 652 - DNA, 1734 bp, Artificial Sequence
  6xHis UPI00029BA293
atgcatcatcaccaccaccatgaaaatctgtatttccagggtagtatgacgtcagtcaaacatttcgccgcgtatggcgctgtagaaggcggcaaagaatataataccgtagatatgagctcgcagcgtctgttcaatgattatatgcccccgtataaagaagccctggatgcgggcagcggcggtgtgatgatcgccctgaattcgttgaacggtacgccagcagcatccgatggctggctgctgaaggaccttctgcgtggtgattggggctttaaaggcattacgattagcgatcacggcgcgattaaggaattaatcaaacacggcaccgcaagcgatccggaagatgcggttcgtgttgccatcaaatctggcgttgacatgagcatggcggatgagtactacagtaaatacctgccgaatcttatcaaaagtggcaaagttacaatggcagaactggatgatgccacccggcatgtgttgaatgtcaaatatgacatggggttatttaacgatccgtactcgcatctgggcccaaaagacgctgatcctaaagataccaatgcagaatcccgtctgcaccgcgatgatgcgcgtaaagttgcccgtgagtcactggtcctcctgaaaaaccgtcttgaaacgctgccgctgaaaaagtcaggtactattgcagtggtaggcccgctggccgattcaaaacgcgatatgatgggcagctggtctgcggcgggagtggccgaccagtcagtgacgctgttacaaggcatgaaaaacgtagctggggacaaagccaaaatcctgtatgccaagggtgccaacgtaaccgatgacaagggtattgtagatttcttgaacctttacgaacccgccgttgtggtcgataaacgcaccccgaaagcgatgattgatgaggcggttaatgttgcgaaacagagtgatgtcgttgtcgcggttgtgggcgaagcgcaggggatggcccacgaagcatcctctcgtaccgacctgacaattcctcagagccagcgcgacctcattagcgcgctgaaggcgaccggcaagcctttggtcctggtattaatgaatggtcgtcctttagccctggtaaaagaagatcaacaggctgatgctattctcgaaacctggtttgctggcaccgagggcggcaatgcgattgcggacgtactgttcggcgattacaacccctccgggaagctgcctatttcctttcctcggagtgttggccaaatcccggtctattactcccatctgaacactggccgcccgtacaatccggagaaaccaaacaaatacacttcgcgctacttcgacgaagcaaatggtccgctctatcctttcggctatggtctttcatataccaccttttccgtctccgacgtaaaactctcggccccgactatgaaaccggacggcaaagtgaccgcatcagttaccgtgacaaacaccggtaaacgtgaaggggcaaccgccgtacagatgtacctgcaggatgtcacggccagcatgtcgcgtccagttaaacaactccgcggcttcgaaaaaattactttgaaaccaggcgaatcccaaactgtgagtttcccgattgacatcgatgcgttgaagttttggaaccagcgaatgaaatacgatgcggagccgggcaaattcaatgtcttcattggtttggactccgttcgcgtgaaacagggcgaattcgaactactatga

SEQ ID NO: 653 - DNA, 2604 bp, Artificial Sequence
  6xHis UPI0001BBDF1E
atgcaccaccaccatcaccatgagaatttatattttcagggcagcatgaacggtaatcgcggcgtggtggacagctttttggaagaactgacattgccggagaagattgacctgttagccggcaaaaatatgtgggaaactgcaagtattgaccgcttaggcattccgtcactgaaaaccaccgatggtcctgcgggggttcgtggcaaaatctggtcaggaggcagtcgcactacgttcattccttgcggtgtgagtcttgcggcgacgtttaatctgtcactcattgaagaggttggggaagtcctcgccccgacgatgaacatcaatcgttccccgctgggtggccgtaactttgaaagctttggcgaagacccaatgttaaccggccgcatggcctcagccatcatctccggtatccaatcacagggcgttggtgcatgcatgaaacatttcgttgcgaacgataccgaaaccaaccgatataatgtggacgaaaagatagacgatcgcaccttacgcgaagtttacctgcgcccgttcaaattggccctggaagcccacccgtggacggttatgaccagttaccagaaaattctgggagaacatgtggatgctagctcacgtttagtaaaagacctgttgcgcggcgagtgggggtttgatgggttagtaatgtcggactggggcggtctaaatgatactattaaaagtttagcggccacgaccgatttagagatgccgggccctgcggtgcgtcgtgggaaaaaactcttagaagccgtgaaaaaaggagatgttgatgaaggcacccaaatagaccagtccgtacgtcgcgttctgacaaccatcgaacgtgcgggcgtgctcccgagctcaccaacgagcagctcccgtgtagaagtgaatggaccggaagactatgactcagttgcgggtgaacacgaagatgatagcgatccgtcctttcgtcgtattgctcgtcaggcggctcgagaaggactcgtcctgctgaaaaacaaaaccatcctcccgattaagccaaaaaaccttaaacgcattgccattctgggccctcaagcaaagaaaccgaccgcaggtggcacgggttcggcggctgttaatccatattacgtatcctccccttacgaaagtctgtcagaagcgctgcttagtgagaatagtaatattcacattcagtatgaaaaaggtattcgcaccagcgatgttccgcctctgcttggcgatcggttacaaaatgcagcgggtcagggactacgtgcagatttttacgcgggccataattttaaaggcaatatcatcgaaacgacctattggaaagattctattgtttatctcatgagtgatggagacgtccctgccgaattagccgaccgtgattattgttttcgcgttagcggtgctctggttccggatgtgtcgggcatgcacaccttttcattagccaacattggtcaggctaggctgtacctggatgatgaagtggtgattgataataccagctggatcgaaacctccggcctttttatgggctgtgcatcacgtgagaaaaccgcacaggtcagtttggaaaatggccgcgtgtataggctgcgcgtggattatgtagcgacccctcctccggtggaagcatatgataacacgcttttccataaagtcagcggcgcgcgtatcggtttactagccccggaagatgaggatgaaatgctgagccgcgcctgtgatgcggcggaaaaagccgatttaagcctggtagtagttggcttagatcccgatgaagaaaaagaagggggcgatcgttcaagcctggaaatgcctgaacgcgtcaataaactgattaaagcagttgctagccggggcgaacacgtggctgtaattgtacagagtgcttgtagtgtgggtatgccgtgggtgcacgaagttgatagtattgtccaggcatggtaccagggccaggaaaacggtaacgccttggcagatgtgctattgggtaaacataacttttccggcaagttaccggtgacatttccggttcggattgaagatcatggcagtagtccttacttccccggcgatgcaaaaaataaccgcaccgaatatggtgaaggggttctggtgggctatcgtcattttgataagcaccagattaccccgttgtggccgtttggctttggtatgagttatactcagtttcgtctgtttggcgcccgcgtttctgggttcgtatcggcatcacaaaacagtgaagcgaccgcgaccgttagcgtccaaaatattggcccgtgcgatggtcaagaagttgtacaggtttatgtgtctccgagcagtgagatttccgtgagaggcctgcagtcatataataaagctctaggcggctttaacaaagtatctgtcgcggcaggccaaacgcgccaggtcaacattaaaatttctagtgaggtatttcagtggtttgatgtgggggacggcatggaagacattaaagaaggttcatggcgtgttgatccgggcacctatcgttgctacatcggcaactcatctgccgcagactttgacgaggtggacatagaagtccgcgaatga

SEQ ID NO: 654 - DNA, 2217 bp, Artificial Sequence
  6xHis UPI0001CCFD36
atgcatcatcatcaccatcacgaaaacctctactttcagggcagtatggcaatttttgcgatggggagcatggcgcagaaccaaaaggatgaagcgcagatgaaccgctttattagcggtctgatgaaaaagatgaccttagaagaaaaggtaggtcaactgagccagtgctcaggtggctttgcgaccggtcccgataacacccgcattagccgtactgaggatatttcaaagggactgatcggatcactccttaatgtgtctggcgcggcgaacacccggaagtatcaggaagcagcgatgaaaagtcggttgcagattccgctgttatttggactggatgtcattcatgggtatcgtaccggcttcccgctgccactcgccgaggccgcaagctttgatctggacgcgattgagcgtggaagtcgctgtgcggccaaagaagcggctgcggcgggccttcattggacatttgctcctatggtagatatctcgtgggatgcacgctggggacgagtcatggaaggcgcaggggaagatccgtactatggcagcctggtggcgaaagcacgtgtgcacggtcttcagggagacgacttaagtaaggaaaatacgatcctctcttgcatcaaacattttgcgggctacggcgcagccattgcggggaaagattataattcggtcgatatgtcgatgggccagtttgttaacttttatatgccgccgtataaagccggcgcggaagcgggtgcggcgacctttatgagcgcgttcaacgactttaataacgaaccgtctaccggctccacgtttctgttacgtgagcttttgaaaaatcaatggggcttcaaaggctttgtggtgagcgattggggtagcgtaggtgaaatgatgaatcatcgttatgccaaggacgaaaaggaagccgcctacaaaggtattaaagcgggtctggatatggagatggtaagcgaatgttactctaaaaacctggtgagcctcgttaaggaaggtaaggtgtcgattaaactggtggatgacgccgtacgcaggattctggagcagaaatataagctgggcctgtttgacgatccgtttcgctactgcgatgaggagcgcgaacggactgtgattggctctcaggagagccgcaaggaagcatgctatgtgagtgaacgaagcattgtactgctgaaaaacgagaactcagtcttgccgctgagctcgagcatcaagaaggtggcattaataggcgccctatcgaaaagccagaaagatatgtgtggtgcatggagctgcgccgaagtcggcaaagtagtgacgctgtacgaagcaatggaaaagcgcggggtagacatcaactacaacgacgggtatgacctgaaaacgaacaaaatagtgaatctagaccagactctcgccgcggctcgtcagtcagacgtggtcattgtagcaatgggtgaacaggcctgggaatccggcgagatgcgcagtaaaggtgatatttcgatcgcggccgaacaacaacgcctggtcagcgaactggttaaaacaggaaaaccggtggtggtcctgatgatgtgcggtcgtcctgtaatttttaacgaagtacgccgtgaagcaccggctattctgtgcacgtggtggctgggctctgaagccggcaacgcaatctgtaacgttctgtggggtgattataacccgagcggtaaattaccgatgacattcccgcagcataatggtcagatcccgttatattaccagtataaatctacgggacgccctactgctctgggtgggtggtgcgcaaaatacattgatattccgaccgaacctgcttacccgtttggttacgggctgtcctacaccacctttaactattccgatgtcaaactgttaccgggcgacggtaaaggcacctatacacgcgtagccgtgaccgttaccaataccgggaaatgcgagggtgaagaagtagtgcagctgtatgtgcgtgatgaagttgcctcgataacgcgtccgattaaggaactgaaaggcttcgaaaaaataaaattgtccccaggggaaagcaaaacggtaaccttcgacgtgaaagatgagcagctgggcttttacaacaatcagatgaaattcatcgtggagaaaggcgattttactcttatggttgggggaaattcccgtgacctgcaggagattaagtacatcctcaactga

SEQ ID NO: 655 - DNA, 2403 bp, Artificial Sequence
  6xHis UPI0001EBD98A
atgcaccatcaccatcatcatgaaaacctctactttcaagggtccatgttctgctcaggtatgtgtttaaactttcagaacagtaccaaaattattcttaatacccatgaaaaaaccatctatatcagtcgacatatcttcctgctgatatcggcgttacgtcctgccagtccccagctaggtaagaactcagtacaggaggtgttgaatgctatgacgctggaagaaaaggttgatttactggttggtgcggggatgcctggtttcggcggccctacggtagggcagaccgaaaatctagttccgggtgcggctggtaccactaaggccattccgcgtttaggtatcccggccattgtgctggccgatggcccggctgggattcgtatatcaccgacccgccaaaatgacacgcagactttctatgcgacggccttccccattgcgaccctaatcgccagctcatggaacttagaactagcggagaacattgggaaagctatgggcaaagaggcactggaatacggggcagacgttctgctggcccccgcgctgaacctgcatcgccacccgctgaacggtcgtaactttgagtattattccgaagacccgatcattagcggcaaaatgaccgcagcggctgtgaacggcattcagagcaatggtgtgggcaccagcatcaagcactttgcggcaaataaccaagaatccctgcgtagtaagaacgatgtccgcattaagaaccgtaccttacgtgaactctacctcaagggtttcgaaattgcggtgaaggagtcgtctccgtggacggtgatgtcgtcgtacaacaagatcaatggtacctatacatctgaaagccgcgaactgttgaccacggtgctgcgcgatgagtggaaattcgacggcatcgttatgaccgattggtttgggggcaccaacatcgtcaagcaagtgcatgcgggtaacgatctgctcatgccaggcattaaaccgcagaaggacgccatcttacaaaatgttaaggatggcaagttggacgtaaaagacgtggatgtgaacgtacgccgcatcttggatctgattcttaaaacgccgcgcttcaaaaaatacccgtatagcaacaaaccagatctgaaggcgcacgcgcttattgcgcgtgaagcggcagctgagggtatgatcctactgaaaaatgaaaaactgacgctcccgattagtagcgagacaaagattgcagcttttggggtcacctcctacgattttattagcggtggtactggctcaggtgatgtgaatgaagcgtacattatttcgcttatggatggactgtcggcgtttagtgtggaacggaagctcgccgagaaatatagcgtctatgttggggattataaagaaaagaataaacctgatccgaataacccgatggcagcgttcctgaacaagccgcgtatgccggaactggaattatcggaaagtgaaattggggaatatgcgaaaagcaccgatatggccatcattaccatcggtcgaaatagtggagagtttgaagaccgtaaaacgaccaacgatttttatttgtctgacgaagaacagaaccttatctctaaagtagcgaaggcctaccattccaagggcaaaaaggtcgtcgtgatcctgaatgtcggtggagttattgaaaccgcatcctggaaagaaaaaccagatgcgattttacttgcatggcaggcgggtcaagaaggcggcaatagcgtagcggatatcctgtcaggtaaggttggtccgtcaggcaaactgactatgtcatttccgaacgacctgaaggatgtggcatcgaataacaattttccgattgatatcgaactgaacttccaagaaatgatgggaggtggcccgcctaatagcgcacaagagccgcgcaaaaatttagaatttactacgtatgaagaggatctgcacgtaggctatcgcgattatattaccaacaaaaagcaggttagcttcccctttggcttcggcttaagctacaccagttttgattttcgcaattcaaagatttccggcgactcgaaagtgggatttacactcaaagtaaccgtgaagaacaccggtaaagcaaagggtaaagaaattgtgcaaatctatcgcagcaacctgaataaagatcctgaccgtgagctaatttcgttcggcaagactaaagagctcgcgcccggggaggtccagatactgacctttaaaattaattctgaggatttctctatttttgacgagtcgatcaatgcatgggtaaccaaagccggcaactaccatttactgatcggcaaaagcgtgagcgacattatcttaaccgaaaacgttgaaatcaaggaaaaatttgagcgccgtgtgatcgcgcgcttctga

SEQ ID NO: 656 - DNA, 2181 bp, Artificial Sequence
  6xHis UPI00020102A5
atgcaccatcaccaccaccacgagaatttatacttccagggctcgatggctgttcgttggtttcagcgcgcctttaaacgtattatccagaaacgcatggtggaaatgcttgcgagccgtagctacacccttaaccatgaaccgatgcacttgctcttgtctgagagtgacgaacgttcagttgcaaaacgtctggtcgccgagatgacccttgaggaaaaaatctcgctgctttcaggtttcgaggaattctgcattcccggagtagagcgtctgggactgaaaccggtctggactagcgacgccacgctgggtctgcgcggctggaaagccacagtgaccgattttccggcttcggttgccttagctgcaaccttcgacaacgaactgctgaaacaagttggttcggtcatgggatacgagtgtcgcgccctgggggtaggtgtgctgcttggacctggagtgaacatcgcccgtgtgcctgtgaatggccgtaacttcgaatactttggtgaggacccctacctggcgtcggaaatggccgtgcattatattgctggtgttaagcagtacccggtgattaccaccgtgaaacactttgcctgtaacaactctgagtacgatcggcacaaaagcaacagtgaagtggacgagcgcagcctgcgcgaactgtatctgccggcattcaaacgtgcgattgaagctggatccctgggtatcatgacatcgtacaaccaggtcaatgggtcttacacctcagaacacccgtacctaattgaaggaattttacgtggcgaatggggatttgatggtctggtagtgtcagactggaacagcctgtacagcaccgatggcgcccttaaacacggagtggatctggagatgccgcaggctaaatacttcacgaaggagcgcgtgcttgatgcgttacgtcgaaatgtggtagtggaagaagatcttgacgcgaaagtgttgcatctactcacaagctatgaaaaggcgggcctgtttaccgcgcctatggcggacccatgctgtaaagtaggcagtccggagtctcgcacaattgcactgaaagcggccttggcagcgcctgtgctccttaaaaacgaacgccaggccttgccccttagcgcgagtatgaaactgtgcattgggggaagcaacgcctttcgtgtggctcaaggtggcggatcgagcatgattcagcacgaatcagaacctgagacatttgcatatcgcatgcaggggtcaggtgctaccctgcttccggcgcgttggtatgcgcacgcaaaagaaaaacagcgtgtgcgtgcatgtgatgcggtcgttctggttgtgggctttgatcacattgaagaatcggaggcgtatgatcgtccgtggacgttaggtgaaagcgaccgtaaagcaattgatatggcggtaaaactcaataaacgcacgattgtcgtcgtgcagtctggctgtgccctagagatggagagttggcaggatggagtagccgcaatgctggcaacctctttcctcgggagctgtaccgcccaagccttgcagtctctgctgctgggagaagtttcgccatcaggcaaactgccctatacccaagcgcgtcatgtgcatgattaccgtagtatgcgcgcttatccgaaagattttgaagcggtaacggtggcgcgtctgaaaaaaggtcagggcgacccggcagtgcgcgccgtagaaaagttatgctacacagaagccctgatggttgggtatcgccaatttgacactgaagtgacagaacctctgtattgctttggccatggtctgagctatagcacgttctgctacggacatctaatggtcgatgagctgtcaccgggcaaatggcagctttctctgacggtcacgaatacaggcagttttcctgccagcgaggtggtgcagctatatgttcatgcgctggagccggttatcttccgcccctttcaagagttgaaaggatatcagaaagtctttttagagccgaacgcggagaaagaagtgcagtttatggtagatgccaaagcgtttgagcgctgggatctgaatgcgtggaagttcgtgagcgatgagggtcagtatgaactgcgtcttggctcttcatcgcgcgatattcgcttaaccgctgttgtggaatataagaaccgcaaaccgtga

SEQ ID NO: 657 - DNA, 2175 bp, Artificial Sequence
  6xHis UPI000207D6A0
atgcaccatcatcatcaccatgagaacctctacttccagggcagcatggaaaagcgtatgttcagagttgatgcttggaaaattgctcgcagaattgtgagccgtatgacgctagacgaaaagatttcccagattgactaccgtgcgagtgcgatcccgcgtttagatatcccggaatacaactggtggaacgaagccttacatggtgtagctcgcgccggcatcgcaacggtttttcctcaggccattgggttagcggcgatgttcgatagcgacatgatggagcgcattggtgcagtgattagcaccgaaggccgtgccaaatacaatgaagcggtacgccacggcgatcgggacatatacaaaggcttgaccttctggagcccgaacgtgaacatctttcgtgaccctcgctggggacgtggccaggaaacctatggggaagatccgtatttgacggcgcgcctggctgtagcgtttattcggggtattcagggcgacggcaagtatctcaaagccgcggcatgtgctaaacactttgctgtccatagcggcccagaagcgctgcgccatgaatttgatgcccgggtaagtcagaaagatcttcatgagacctacctgtctgcttttaaggccgccgtgaaagaagcccaggtcgaaatagttatgggtgcgtataatcgtgttaatggcgttccggcgtgtgcgtcacatgagctgttgtcggatatcttgcgtagcgaatggggctttgaaggtcatgtagtgtctgattacgaagctctggaagatattttcaaacaccaccactatgtggcggatgaagcccatacgatggcagttgcgttaaaggccggctgtaatctctgcgcgggcaagattgcacgccacctccgctcttctgtggatgaaggcctaattagcgaggatgaaattacagaagcagtggagcgcctgtttaccactcgtattatgatgggtatgatggcggacgattgcccgtatgacagcattggctatgaagagaacgacaccccggaacatcaccagctggcggtcgaggcggccagccgctcctttgttttgctgaaaaatgatggactgctgccgctggagatggagaaaattagcagcatagcggtcattggccctaatgccaatagtcgcaaaatgcttgagggcaactataatggtactgcgagtcgttatgtgaccgtcctggaaggaatccaggaccttgtgggagacagcgttcgcgtttggtactcagagggttgccatctgtacaaaaacttccacagtagtttgtccggccgcaacgatcgtctcgccgaggccgtgtctgcagcacaacatgccgacgtggttgtactgtgtctcggtctagacgcaaccctggagggcgaggaaggtgatgtagaagtaggatttggctctggcgataaaccgaatctgtcgttaccgggtcgtcagcagcttcttctggacacgatgctgacggtgggcaaaccggtcatcctgttgctggcatctggatcggcactgacactgggcggccgcgaaaacgatgaaaacctaaaagcaatcctgcagatttggtatcctggcgcaatgggcggcaaagcggttgccgatgtgctctttggacgccgtgcgcctgcggggaagttaccagtgactttctatgcatcggcagacgaactgccggcatttgaagattactcgatggccggtcggacgtatcgctatatgaaaggcaacgccctgtatccgttcggttatggtcttacctactctccttgctctatcgtatcggcgggcatttctggcaaaactgcggatggtggagtggagatcaccgttgacatccgtaatgacgggggacgcacaaccgaagaagtcgtccaggtctatgtaaaagacatggatagtccgttggcggtaattaatcatgcgctggccggcttccgtcgtattacgttagccccgggcgaaaaaacgtcccgtaccatcgttattgaacctgaggcattcactgttgttgatgagggtggccgtcgcattccgggtggacgtcgctttctgttccacgtgggctttagccagcctgattctcgttcgattgctctgtgtggaatcaagcctgttgaattagaatacctgcgcaccgattga

SEQ ID NO: 658 - DNA, 1662 bp, Artificial Sequence
  6xHis UPI000212252C
atgcatcatcaccaccatcatgagaatctgtattttcagggcagcatgaacgaaaaaatcaaccgcaatcgcgtgaagggattcctgaaagcgaaaggccgtaccatcgttaacggcgacggcgaagaaatcattctgacgggatggggtttaggtaactggctgctacctgaaggctatatgtggatgagtcacacgggcgcgttcgatcgaccgcgtcgtattgaagccgttatccgcgaactgaccggcagcgagtatagcaaacaattctggaaacgctttcgcgacaattacattacgaaagaggacatccaggcgatggcggaccaagggtataatagcgtccgtattccgttcaactggcgtaacctgatggaaaatgaaccgggcttgatttggaaagaagaaggctttaaactgctggatcagtgtatcgactggtgtgaacagttcgggatctatgccttccttgatatgcatggcgcgccgggcggtcagaccggcgccaacattgacgatagtattgatgatcggccacgcttgtttctggatgaggatagctggtcgaaaggtctggcgatttggcgcaaactggcagaacgctataaggataggtggatagtgggcggctatgatttactgaacgagccgattcgtccgaaaaatgaggttggcgactatgactacttagtaccgaagctttcccaattttatgaagaagcgattgccaccattcgagaagtggatccaaagcacctgttttcgatagaaggccatcattggagcacccgtaccgacgtatttcacaaaaagtacgatgataacatggtgattcactttcaccgttacgcatgtctgccggataaatctgcgttcacggagtggcttgaactaagccagaaattagacgccccgctgtggcttggcgaaacgggcgagaatttggttgaatggtacactgccatttatcctctgtcagtgtcccttggcatcggctataatctgtggccgtggaaaaagatgaattgcaccaatagcccttattctatcaaaacaccggagggttggtccaaacttcttgcctatactaaaggcggaccccgcccgagctatgacgaggccaccaaaatcttagatgaatacctggagaacatgaaagttaagaactgcaattataacaaggaagtgacgaattccgtgtttcgtatccctggctgtagtgttcgtgctacggactttgacgaacttccgggcaaaagcaatagcttcagtggcattcgcttaggcaataatgacacaaaatatcgctccggcacgggcatgtgcatcaaagaagatgatacctataagaaagaacagcgcttctactttgactgcatgtgggaccgttttctgctgaacctggaagccggcgaatttgcaacctacagcatcaatcatgtgacgtatgaaaactcggtggtgttcgaatatacctgcgacaaacacgccagcatttcgatttatcaggatgattgcgaattgggcaccgtgactcttggtaagactaccacgaagacgactaccaagcaagtaagtctcctgagcgccaatgaagcgaccatcaaagtgagcgtaaatgaaggcggcgtggatctggcccgcatctattttaaatga

SEQ ID NO: 659 - DNA, 1416 bp, Artificial Sequence
  6xHis UPI0002265447
atgcatcatcatcaccaccacgaaaacttgtacttccagggcagcatggcagccacaaaagcgggtcaggtggtgtttccgaaggattttctttggggtgccgctaccgcagcttatcaggtcgaaggcggttggaatgccgacggtaaaggcccttcaatctgggatacctttactcatcagaaaggtcagggtcgtatcaaaaatgacgataccggtgatgtggcgtgtgatagctaccataaataccgcgaagacgccgccctaattcgccagatgaatcttaaatcttatcgctacagcattgcctggagccgtgtgcaacctctcggcaaaggcgcagtgaatcaggcaggtctggattactacaaacgtctgaccgatgcggtccttgaagcgggagcgcgaccgctggtgaccttatatcattgggatctgccgcaggcgttagatgacgccggtgggtggaccaaccgcgacacctcagatcgtttagccgaatatgccgacattgttggccgtgcgctgggggatcgcattaaccattgggcgattctgaatgagcctaagacctttacgcacctgggctattgggaaggaatttttgctcctggccataaagatccgctgcagatgctaaaggcaacccatgtagtgaatttaagtcagggcaaggcgttccgcgcaatgaaagccattaatccgaaatttcaggtggggtcggtatgcgatgttgctaacatgatgccacgtacggatagcgaagcggataaggcggcggctgaacgttatcaccgttttctgaacctgtggtttcttcagccggtgttagatggcacttacccagatgtgctgcctgcagatcagcgcgatgcactgctaggatttcagcctggagatgaaaaaattatgcgcgccgactacgatatggttggcctaaactattacacacgctgggtggttgccgataaaccagaaggtaacggcgtgccgggtctgaatacctcacacgagtggggcgaaggacctcacgctaaaactgacatcggttgggacattgatcccgatggcttccatgataccctggtgcgcatggccaaagcaataggcaatcgcccgattgaaattacggaatcaggagccgcgtacaataccccgctcgtcgatggacacgtgaaagacgagaaacgtattgaatatatgaaagcttactttgccgcgctgtcacgtgctattcaagacggcgcccccgtccgtgcctaccatgcttggagtttaatggacaacttcgaatgggcgcagggttatacgcagcgcttcggactcacctatgttgactaccgtaatgaccagaaacgcaccattaaggactcaggcctgtggtatgccaaagtcgccaagaacaacgggttttga

SEQ ID NO: 660 - DNA, 1419 bp, Artificial Sequence
  6xHis UPI00023420B8
atgcatcaccaccaccaccatgagaacctttactttcagggttcaatggccgttctcccgaaagactttgtttggggtgtctcgacttcagcctatcagatcgagggtgctgcggccgaggacggtcgtggtccgtccatttgggatactcgttgccgtaccgcaggtggcgttgttaatggcgataccggtgatgtggcctgtgatcactaccatcgctatgcggaagacgtggctctgttacgggatataggtgtcggtgcgtatcgtttctctattagttggccgcgggttttgccgcgtggccgtggtgcggtaaatgaagcggggctggatttctacgataggctaattgatcgtctcctggaagccggtattgagccgtgggcgtgtctttatcattgggacctaccccaggcgttacaggatttgggcggttgggccaatcgcgacagtgctggctggtacgccgattatgcggtgttgtgtgcgcgccgttttggtgatcgagtaactcgttgggcaacatttaacgaatttagcgtgtttaccctgtttggttatgcactgggctggggagcgccgtctgtcagcgatcgcggtgaacatcttaaagtcattcaccacaccaacttagcacatggcgccggtgtagatgtcttacgtgcacttgttccgggcgcaagcattggtgctgtacattctttccaaccgtgtcgaccagcagatcctgcgcccgaaaacgttgaagctgcggcgttatttgacgagctctggaatctgtgcttcccagacgcacaaattttaggccgttatccaccgcgcattgctcgtgctattgaaccatacgttcaggcgggtgatatggcccgcatttgccgtccggttgattggtttggcatgaaccactacgcgcccttatttgctcaagcggaaccaggtgcggtgtgggggtgcggctttggagccccacctaaaggaatgccgcgaaccgatattggctggcccctgcaacctagcgccttccatgaagccttaatgcacgcagcggcgcgctatcgcttgccgatttatgtaactgaaaatggctacggcactaaagcgccggagagcccggatgctcagggtatcgttatggatcgcgaacgtctggactatctgcaggcgtgtatcggcgaaatggctcgggcagtgcgtgatggtgccgatgttcgtgggtactttgtctggagccttctggataatttcgaatggggcggcggctatggcacccgcttcggaattgtacatgtggactttgagacgcaagcccgcactccgaaggaatcagccaagtggtatagcgccctgattggcggggcgttaggcggtcagacggcagcaacccccggtactggtcgttttgcgggtcgtagctga

SEQ ID NO: 661 - DNA, 1401 bp, Artificial Sequence
  6xHis UPI000255314F
atgcatcatcatcaccatcatgaaaacctgtatttccagggcagtatgactgttgttcgtcctaccgaagcggccccatcgcgccagttccctaaagattttttttggggcgcgtccagcgcagcgtaccagatcgaaggagcgacggaaacagatggtcgcggtccgtctatttgggatacgttcacggcaaacggccacattatggatgggagtagcgcccgcatcgcgtgcgatcattatcatcgctatgcagaggacgttgcgctgatgaaacaggcgggtttttcggcctatcgctttagtctcggctggccccgtattgtgccagcaggaaccggcgcagttaacccaaaagggctggaattctacgatcggctggtggacaaaattctgaaagccggcattcgtccgatggcatgtctgtaccactgggatctgccgcaaccgctggaagatatgggcggttggcagtcgcgtgaaattgtgggaccgtttgcggattatgctcgaattgccgttgcccgtttaggagatcgtgttaaagactggtacccgttgaacgaaccgaatgttgttgcagttagcggctatggcaccgctgatcatgctcctggcttacgcgcaggagacctgggcatcctgaaggttctacaccatcaaaacttagcccaaggagctgcatttcgtgctattcgcgccgaacgtccgaatgtgcgagttggaaccatttgcaacttacagccatcacgtccggaaaatgatgaaccgcttaatcgcgcggcggccattcgttgggatgccgtgtggaaccgtgttgcccttgatggagtgctgcgtggtgccatcccggatgttctcgcagagaaaatggccccgatcgttaagcctggtgatctggaaaccatccgttttcccatcgatagcctgggtatcaattattactcgcgtatgacgatgcgtcacgaacctggtcgtccctttgatgtgggttggggtgatgctcattgtaaccgttggactggcatggcgctgcccgtacaaccagatggcctgtacgacttactgctggaactgaagacgttgtatggtaatccggaagttttcgtggcggagaacggagccgcttacgatgatgttgtaagtcctgatggccaagtacatgacccggaacgcgtggcgtttttaaaggatcacgttgctgaagtagctcgcgccctgaaagacggttgcaatgtgaaaggctacctggtgtggagcctgttagataactttgaatgggcattcggtctgagcaaacgcttcgggattgttcgcgttgattttgatacgcttaaacgtactccgaaagactcctacaggtggttcgccgaagttattcgtaccggtcgtgtcgggtga

SEQ ID NO: 662 - DNA, 2532 bp, Artificial Sequence
  6xHis UPI000260A2FA
atgcatcaccatcaccaccacgaaaatttatatttccagggctcaatgaatccagcgtcgtcaacccgtactgacaccatgacagacacgaccgctcggactgattcacgcttaaccgacgcattggccgctctatcattagaacagaaagtacagctcctgaccggccgtgatttctggaatacatggcctatcgaagaaattggccttcgtcgcatcctggtttcagatgggccttcgggtgttcgtggtgaagtttgggatgaacgcgacccgagcttgaatctgcccagcgctactgcgctggcgtcggcatgggacccagatatagcgcgccgctatggtgccgccgccgccgtggaagcccgtagaaaaggtgtggatgtggtgttaggcccgaccattaatctgcaccgcagcccgctggggggtcgtcattttgaagccttctcagaagacccggtactgacagcggaactagcagcggcctatgtaacaggcgtacaggacaacggtgtgggtgccactccgaaacactatgtcgccaatgattttgaaactgatcgtttcactgtggacgtacgcgcagatgaacgtacccttagagaattgtacctcctggcctttgaaaaggcggtaactgaagcgcgtgcatggctcgtaatgagtgcctataacggtattaacggagccactgccacagagaacgacctgctggaaaccccgctaaatagcgaatggggctttgatggtgtcgtagtgtcagattggaccgccgtgcgcagcctggaatcagctcgcagctcgcaggatctggtcatgccgggtccggttggtccgtggggggatgctcttgtggaggcggtccgcactggtgccatcgacgaaagtgtggtggatcgcaaagtgctgcgtattttaaccttagctcagcgcgttggggcgctggaaggtagcccggccattgatcctgtgtgggttgaagatggggttgccctggcccgtgaagcggcggtagaagggaccgtcctcttagaaaatcgtgacgaactaccgtgggatgccacctcgttacgcaaagtagctgtgataggcaataatgcagccgctgcgaggacacaaggtggtggcagcgcgaccgtattgccggaatatacagtcagcccgttagacggtgtgcgggcggcgctgccggatgcagaggtaagctatagcctgggtgccgtagtgcaagatggcctcgtagaactcccgttagcggaattgaccaatccagtgactggtggcccgggcttacgcgcgcgctttctgacggcagacggcgcagaactgttcggtgaagaccgtcgtaaatccgtcctggtgtatttcggcggtgatgcgccgatcgcggcggcagcgacctatgaattaaccgcacgctggaccccgactgaaagccaaacggttagactgggattcgcactgattggcgccgcgcagttatacgtagatggcgaattgctggttgaaagtgatcttcagccaagcggcacagatttgggcgccgccttcatgaacccattaacagcctcagctgaagtagaacttgttgccggcaaacctgttgatgttcgcctggtgcatgacttgagcgcgaaagaaggttttgccgcacacgcgttgtttttacagctgggtaccgaaccggctgaggttgatgaagatgcattaattgctgaagccgcagaagcggctgaagcagccgatgttgttctcgttgttgtcggtacgaactctattgtggagtccgaaggatacgatcgcgaaagtctaagtctgccaggtcgccaagatgatctggtccgcgcggtcgtggcagccaatccgcgcaccgtggtactggttaacgcgggtgcaccggtcttgctgccttggcgtgatgacgtagcagcactgttactgggatggttcggtggacaggaattcgggaacgctgttgcagacgtcctgctgggcgtagctgaaccaggcggtcgcctgcctaccacctggcctgccgcggaagcggatgttcccgtgttgagctgcacccctgttgacggggttgtcgaatatactgagggcattcatatcggatatcgagcgtggctgcgttcaggagcgaccccagcgtactggtttggttctgggcagggttacacttgcgttgaactgaccggtgttgaggctccgtcacgcgcccgcccgggtgaaattgttaccgtttcggttgaagttgccaatcgtggcgaacgtgatgggaaacaagttgtgcaggtgtatgcagaaaaaccagatagtacagtcgatcgtccggtacgttggttagtgggctcggcacctgttcgtgtgcctgcgggtcaaaccgcccaggtggaagtggcggttccaacccgttatctggctcactgggcgggaggctggcaatatgaaccgggcgtttaccgtttaagagtcgggactaccgcggtcgaattaccgctcgaaacaaccttagaagtgtcggcctga

SEQ ID NO: 663 - DNA, 1545 bp, Artificial Sequence
  6xHis UPI000283EB8D
atgcaccaccatcatcatcatgaaaatctgtacttccaaggctcgatggtgttcgataagctgaaaaaactgactggggataagccgctagttcctgcagccccggcagcgccggcaggccaggcaccggataaaaaaacgatttaccgtaatcgttataacttcggggtgaatttcggttcgcagtttgtcctcgaaaaattcatcttcgacaaattctttgtggacaacaccggaaccgaattagaagccattacagcatatattaagcagaacggcgcagataacacgcagaaagatctggaagctcattggagtggttttgcgaccgatgacgactggaattggctgaagagtaagggggtgaaagcggtacgtctgccgattggttattggcatgtgaacggtggcagcttcgcatcgggtacaccttttgcatctatcgccggtgtctacaaaaatgcatggaaccatataaaagacgtggtgaataaagcaaaagataatgagatcggggttctggtggatttgcatgcagtgccgggtggagcgaatacgggtgatcatagcggccagaagctggataaaccggaattctggtcaaataaaaactaccagcagattgccattcaagcgctcgaatttatcgccaacgaatttaaagatcaagagaacgtcgtcggcctgcagatcgtgaacgagattgactttgataacaacccttctaatcagcaggagtactatcgcaaagctacaaagcacatccgccagattgatggaaatattccgattattatcagcgatggctggtggccggaccaatatgtgaagtggatcaacgaaaatgagcaaaacctcaacaatcaatccgtgggcctggtgattgacgatcatgtataccgctgctttagcgatgcagacaaagccaaaagtccggaacagatcatcaaagatctcgatggcgatgtactgacgaaccttagtggaccggcggatattattgtcggagagtacagtttggttctagatggcgaatcgtggaacaaaacaagcggagatcgcgcacagttggtacatcagtatggtaacgagctgtcgcgtatttttgccgaacgtgcttcgaccggtacctacttctggactctgaaatttgaacatggcgacggaggagaatggggcttttatccgagcgtgaatagtggtgcgattccggcccacccgactggcttatctaaagtgccgactgaggatgagtttaatagcattctgaataatgaactgaaccagcacagctcttactgggatggtcagaacccgaatgaaaaatatgaacactggcgctatcaggaaggttttaccagtgcgtgggtcgacagtcagtcgtttggtcagttcaacggtagcaaaattggccgtttaagcgcgtggaaatcggcgcgtcgtgccgaacacatccaaaaccgtggcaacagcaacttcatttgggaatgggagcagggatttgataaagcgatttcaattttcagccaggtcgcctttcagtga

SEQ ID NO: 664 - DNA, 1437 bp, Artificial Sequence
  6xHis UPI0002A5D085
atgcatcatcaccaccaccacgaaaacctgtactttcaaggctcgatgtttgtccaggataagtttttgtggggtgtagcgtcagccgcatatcaggtcgaaggcggttaccaagcagacgggaagggtcgctcgaactgggacgtttatacgaacgactaccaagtgactaaagccttcattgataaacagcataccggcaacgtggcgattaacttttacgaacggagccagtatctgcaagatattgccctgatgaaacagttgggtgttaatgcgtaccgcttctcaattgcttggagccgtattttgcctaacggcacgggcgaagtgaattcgcaaggcattgcatactacaaccaactgattgacgacttactggccaacgacattgagccggtaattactaatttccactgggacctcccgtacaaattacagcagcgcgggggctggtcacacagcgactcggtacagtggtatgttgaatacaccaacgtgctgttcaccaactatggtgaccgcgtgaaaaaattcatcaccttcaacgagccgtttatttacctgttctttatcgaaccgttagcgcataacgccatcgcgaaaaaagccaatccgtacgcaattagcaacgagacttacggcaaacaggcggaagcagttcatcatctgttgttagcgagcgcgattgcaacccagaattatcaccagttgaatctgggtggcgtgatcggcatcacattatcgttcaccccgacgattccgttagatgccaacaacattgaagatgtccaggcggcaactgtgtttgacggtttacacaaccgctggttcctcgatgcgatttacaaaggcaaatatccggacgatattgttaaattgcatcagaaatataacccggcgttgcaagtaagcgcagcggacatgcagcttattgccgctcacaaaccggatttcattggtgtgaacttttatgccccggcttacattaaagcggatgcctctgcaccgtatggcgccgaatggttttctactaatccagatgaggtaaaaatgtttaatggcccggtgcgcccggaatatctgtaccagctactggtgtggattaaaaacgagtatggcaatccgacaatttatatcacagaaaacggggcgggttttggcgccgccgacgaacaattaaacggtaatattgtgaaagaccgcttgagaaccgactacatcaaacgccatattgattccgcgttacaggcgaaacgagatggtgttgacctgcgcggttattttctttggagcttctgcgacaactttgaatggctgtttggttatgacaaacgcttcggcatcgtgtacgtagattttgatagccaacagcgcactcccaaacagagtttctacgcctatcagcagattatcaacgaacgcaaatgcgaatga

SEQ ID NO: 665 - DNA, 1440 bp, Artificial Sequence
  6xHis UPI0001A3BCB6
atgcatcatcatcaccaccatgaaaatctttattttcaaggcagcatggcggaccaaattcatcgccgcgaattccctgagggttttaaatggggagtcgcgacatccgcgtaccagatcgaaggagcctgggacgaagatggcaaaggacagagcatctgggacacgtatgcccatacacccggcaaaattcgtgacggcagtacgggtgatattgcgaacgaccattatcatcgttacaaagaagatgtggcgctgatgaaggagatgggcgcgaacgcctatcgcttttctatttgctggcctcgtatctttcccgaaggcacgggcacaccgaatccgaaaggtctggatttctataatcgtttagttggagaactcctggccgcgggcatcgaaccttttccgactttgtatcattgggatctaccgcaagcgttacaagacaaaggtggttggcagaatcgtgataccccggtagcgtttgcgcattatgcaggttatgtggccgaacagctgtctgatcaggtgcgccacttcttcacaaccaatgagatccagtcttttgcggacggcggccatcgtggtgtagatacccatgttgcgggtggtgaactgcatttagaagcggcgcctggattgcgcctgccgcctggggaattaaatcaggtccgtcatcatgcggtgttagggcacggtctggccgtacatgccatccatgcaatgggtaaaccgggcacgcagtgtggcccggcagaagtgatcagcattgcagtgccgcttatcgagagcgacgaacatattaaagcggccgaagtcgcaacccgcgaacttaacgccccgttcctaaccgtcattctggaaggccgctacacggatgcttacttggaaaaagccggcaaagatgcaccgcgctttacaccggaggatctggcaaccatttcggaaccggtggattttgtcggcattaacgtgtataaaccgaatatttacgtcttggcgtcagacaccacccccggttatcgtgccattccctatagtgcctctcatccgaaaatgttctcagattggcacatgcttggtccggaggcattatattggggtcctaaaatggtgcaaagcttgtggggcgcaccagcaatttatatcactgaaaatggatgcgccgcagccgatgaactggcagcagatggtaatgtgtatgacacggatcgtatcatgtttctgcgtaacagcctgacccagttacaacgtgcgaccgcggaaggcgtaccggtgaaaggatactttctgtggtcaatgatggataactttgagtggatgaatggatacggtgatcgcttcggcatagtttatgttgattttgacacgcaacagcgtattcccaaaatgagcgcgagtttcttccgcgaagtgtcaatgcataacgccgttgcctga

SEQ ID NO: 666 - DNA, 1992 bp, Artificial Sequence
  6xHis UPI0001CCEF1F
atgcaccatcaccatcaccatgaaaacctgtatttccaaggcagtatggtgcgcggatataacaaatttttcattaaaggctttgaggagaaaggtatacttcccgtttatctttcagacgccacccagggggtaaatattcgcaataacttacccgatccgaacgtagtgaagcagttagaacgatcgactgcgtttccatcgcccattttgctggcgtcgaccttctcaccggaactgagctatcagtatgcaaaagcaattggagaagaatgtcgtgcaggtggaattgaagttttgctcggccccggtttaaatatctaccgccagtcccagtgcgctcgcaactttgagtatttcggtgaagatccgtacttagtttcacagatggtgtctcagtacgttactggtcttcagtcgaccggcaccgccgcgtgtttaaagcatttctacggtaacaacaccgagttctaccgtaaacgctcaaacagtattattggcgaacgtgcgatgaacgagatctacctacccggttttaaggcaggtattgatgcaggcgcgatgagcgttattaccagctataatcagattgatggggaatgggccgggcagtcatcttatgtgattaagaagattctgcgtgaaaagttaggcttcaaatggctggtcatgtccgattggaacagcgtttgggatctcgaaaaggttatcaaatccggtcagaacctggagatgccgggctcatacaacttcggcgtgtccgttctcgacctatatcatgaaaagaaaatcacagagaaagatcttgacgatatgattcgcccgaccctggcgacctgtgtagcaatgggtttttacagccgtcccaaatatgataccaccttgctgtcgaaatatcccgaacatgaacagacggcccgcagagttgccgaagaaggcgtggtcctgctcaaaaaccgtaacgaaattttgcccctagatccgactaagaatcgcaagatattgctgacgggcaagtttgtatatgaaatcccgcgcggctatggcgcggcggaagtgattggttacaataacgtgagccttattgacgccctgcagaaagtatttggccgtaccgtctattacattgaaaagccgaccgtggcagaaatcaaggaagcggatgtggtgctgcttagcatgggaacccgcgataaagaagccgtcgaacgtcctttcgcgctgccgcgcgaagacgaatcgtttatgcgatatatcacaaaaaacaatcccaacacgatcgcaatcattaacacgggatctgcaattgatatgagcgcatggaacgaacagctggcggccctaatctatggttggtacggcggtcaaagcggctttgaagcgctgaccgatatcataattggtaaagtcaacccgagcggcaaactgcccatgacaattgaacgcagttttaaagattcaccggcgtggggctacctgccgcaaggcgccagcctctacaacgagttgaaaaatgagcacctgatcaacgtgtatgatgtgaactacaaagaagatgttctggtaggctaccgctggtacgataccaaaaaaatcgaaccgctgtatccgttcggctacggcctgtcatataccactttcgcacttactaaacctcgtctgtcgtccaataaaatgaatgacaaacagacaattaaatgctccgttacccttacaaacaccggcaaatgcgagggcgcagaggttgttcagctgtacattaaggaaaatcagccgagcgtgctgcgcccggaaaaagaacttaaacgttttgagaaagtcagcctgaaaccgggcgaaaaccgtattttagaattcattattacgtccaaagacctggccttctgggacgatcagactcattcctggaaaaccaacaccggtcaatataccattttccttggaacctccagccgccacattaatcagaccctgagctttattaaagaatga

SEQ ID NO: 667 - DNA, 2349 bp, Artificial Sequence
  6xHis UPI0001F149E8
atgcatcaccatcaccaccacgagaacctgtatttccaaggttctatgtttcgtttgttcttgaccgggctgctgcttgggctggtttcgggcgcatcacccaaaaaggtgatggattataccaattcaaacctaagtgtggagcagcgtgtggcggatctcatgggccgaatgaccctcgaagaaaaggttggccagatgtgtcagtacgttgggattgcacacatgttaaacgcccagaagaccctgactgaggaggaattgaaaaattcacacgcggaaggttattacccgggctatacgttagaagatattcgcgaaatgacccgcaaagggttaattggctcgtttcttcatgttgtgactactgaggaagccaactatctgcaaaagctggcacgtcaatcgcgtctcaaaattccgctgttaatcggtgtggatgctttacacggtaacggtctgtatcacggcgccacagtgtacccgaccccaattggccaggcgtctacatttgctccggaactgatcgaacgcatgtctcgtgaaacagcacttgagatgcgtgcctgcggtatgcagtgggcctatgctccgaacgtggaagttgcccgcgacacgcggtggggtcgcattggggaaacctttggcgaggacccttatctcgttgggcagatgggcattgcgaccgtgaaaggcctgcagaccgaccgtctgagcggtcaggacaaagttatggcttgtgttaaacatcttgtgggtggctccttaactagcaatggtattaacggtagccccgcagatatgtcagaacggatgttgcgtgaagtgtttctaccgcctttcaagaaatgcgtagatgcgggtgtgttttcgctgatgccgagtcacaatgatctaagcggcattccgtgtcacggcaatcgttggctgctgaccgatctgttgaaaaaggaatggggctttaaaggcattgttgtgtctgattggatggatatcgaacgaatgaatgattttcatggaactgccccgacagttaaagaagcctgtctgactggtgttaatgcgggcattggcatgcacatgcacggcccgggtttcgcggagtatgtattagagggtatccgagaaaaccgcatcgacccggcgctgatcaatgccgccgtggggcgtattctggaagcaaaatttcgcctgggactgtttgagaatccatttgtcgcgccgggaaaagtgggggaggtggtgtttacgggaacccatcagcagacggcgttggaaattgcacgtcgctctgtcgtgctgctgaaaaatgaaaagggtctgcttcccctgcaaaaagggcgctataaacgtattttcgtaacaggccataacgccgacaatcagagtatccttggagattggagctttgaacagcctgataaccgtgttacgactgtgctcgaaggcattcgacagcaggattcagatgcagaaattgactatcaagatattgggcggaatgtgcaaggcctgaccccgcagcaggtagatgaagcgacactgcgtgcgcgtaaagcggatctggctatcttagtagtaggcgaaaatagcatgcgctacttctggaaagaaaaaacctgtggggagaactcggataggtatgagctgtctttacctggtctgcaagaacagctggtggaagcggttgtggccaccggtgtacctaccgttgtggtccttgtgaatggtcgtccgctgacgacggaatggattgcggaaaatgtgccagcgatcctagaggcctgggaaccgggttcacttggcggacaggcggtggctgagattttgtacggcgcgatctgtcctagcgcaaaattacctattaccattccccgttccaccggacaaatcggctgttattataaccataaattttgggccaaccgttttccgtatgccacgggtaaaagcgatccgttatacccgtttggctatgggctgtcatatactaccttctcttatagtccagtgaggcttagtgcggcgcgtatgcctccggacggcgctgcgaatgcgacggtggatgtgacgaataccggcgatcgcgaagccgaagaagtggtgcagctgtacatccgtgatgattatagcagcgcaactcgtccggtgaaagaactcaagggttttcgtcgtatttcactaaaaccgggcgagacgcgttctatttcctttgacattctgccggagaccctggcgttttacgacgctgatatgaaatatggcgtggagaaaggtacgttcaccataatgatcggcagttcgtcgcgcaccgacgatttgcagagcgtgtcattgagtgtggaatga

SEQ ID NO: 668 - DNA, 2445 bp, Artificial Sequence
  6xHis UPI0001FF1101
atgcaccatcatcatcatcacgaaaacctgtacttccaaggatccatgtcgaccccatcaactacctacgtagatcatcaggcactggctgacaaggcattagcagcgcgcgagttggttggtacgatgaccgcagaggaaaagactgccctgctaaccgggaacggcatgtggaaaaccgcacggttagcccgcctgggtgtggaaccggcggtgatgacagacggcacgtacggtgtgcgttatagcgtgccgcagattgatggagatgaacaggcaggcacggacttagatgcttttttaagtgtggttcagcaacgcgccagcgaaattgataaagcctggggccaactgcgcccagctacttgttttcctaacggctcagccatgggttgctcctgggatatcgatctgatggcacatctgggagtgcttttgggccgcgaatgtcggacaatgggcatccacacgcttctgggcccggggattaacattcgccgcacgcctctggccggccgtagctatgaatattacagcgaagatccgctgttaacggggaaactggcagccgccgtgatcaccgggattcaagatcaaggcgtgggcacgagcctcaagcacttcgccggtaataactcggagatgcaacgtaccagcatggatagcgtagtggatgcgagagccttgcgtgaaatctacttgcgcggattccagatggccattcgtgacagcgatccgtggactgttatgagcagctataatcgcttaaatggggtacaagcagccgaagacccgtggctcctgacgcaagttttacgtcgcgactgggcctatgacgggttagtgatgtctgattggaatggcattaaggacagagccgcgtcactgaccgcgggcaatgaactggacatgccggaatctccgcgtcgtaaagctgacttacttgcagccattcgaagcggcgaactgtcagcggacgtcgttgacgcagcctgtgtgcgcgttttggatttcatcgcacgctgccatgccggttgcaccgtgccagtggcccccaccgacctcgcagcccatcatgttgaagcccgccgcatggcggcagcaagcatggtcctgttgaaaaacgatggcgcggttttaccggttgccccgacagttcggcgagtacttgtggtcggccgcgacgccgagacccctgttatacagggttccggttgtgccactaccatgccaacacaggttgatgaaccattagcggagttacgtgccttactaggaccggatgttgccattgaactcgatagccgcaataccgcggacgattctctttttgccagggccgccgctgcacatcttgtagtcgtgttcgcctcaaccgaaggtgcttacgatggagagggctccgatcgcagcaccctggcgttgggtcccggacaggacgctctgattaccgcgttggcagatcattgcaccacccctatggcagttgtggtcgcatgtccggacgcggttgcaatgccctgggcagaccgtgtaggcgcggtactggtcaccttttacagcgggcaagcgatgggcggagcggtagccgatgtattaaccggtcgagtaaatccatccggaaaacttagtgtgacgttcccgcatagacttggtgatgtgccggggttcctgtcatatccgggggaacagggtcgtcatctgtatagcgaaggtatccatgttggttatcgcggctacgactttcgtcactgtacgccactgtttccttttggccacggccggtcgtataccacatttcgttatgccgatctccaactttcagcgagctctatagggcgcagcggtcatgtgactgcgagcttcagcctgcataatacaggtactgttgcaggcgcggaagtagcacaggtgtatctgcgtgcgaaaggccatttgctccgccggtcaccgttagaattaaaaggattcgctaaagtggtacttgcaccgggcgaaacgcgccgtgtagatgtcgctattgatggccgggatcttactgtctgggatccagtccgcaatgattgggtactggaagctgaagatgccgagctggtggtggcggctagctctcgtgacttacgcctggcggcgcccctgaccttacgtccgagcgtgctgagctgggctcgcgtgagttttgattcacagccggcttacgtgattgggaatcctgtggcacgtcctattctccgtcgtgagttagctcgcgaagcaaacattagccctcacgatgccgacgtggttctggatcactgcgctaatagttttatcggcattttcccgaccctggaaaggcgacttcgtattacggttccaaacacccgcgcccttgaaattctgaccatgatcaataccgcaatggatgaggccgaattgaaactgcaggaaggggcttccgaatga

SEQ ID NO: 669 - DNA, 2496 bp, Artificial Sequence
  6xHis UPI00020F9774
atgcatcaccaccatcatcatgaaaacctctatttccagggctcgatgttgacccagtcgtacatcacctttctctcagtgttggcgcgtatttcgtacccgagctttattaatcaggctattgcgactcgccaaagcatagatctctctgataagtcgactagcaatgtagatagctctaattatcactttgaggttattcaggccccgccgggttacgaagaatgggttagcccaaccgtgttgccgagcccgtctcaagatggcagccagggctgggaagactcgctgaaacgcgcgaaaaaactagtgtcacagatgaccctggaagaaaaaatcaatattacgacaggcgcgggtatcgagaagcgttgcgttggagaaactggcaccatcccgcgtctcggttttaatgagccgatttgcttacaggatgcaccggtgggcgtgcgtttggtggatttagtgtcttattttccggcggagatcaacgtagcctcgacttttgaccgtagcttaattcgacgccgcgcgatcgcccttggtgcagaatttgcaggtaagggtatccatgtggcgctgggtcccatgacaaaccttatgcgtagcccgttagcgggtcgcaactgggaaggttttggggcagatccgttcttgtcgggtgtggggtcggtggaaacaatcctgggcattcagtctaaacacgtttcggcctgcgtgaaacattttgtcggtaatgagcaagaacattatcgtggaggctccgattccattccgtcatcctcaaacatagatgaccgcaccctgcgcgaattatatgcctggccattcgaagagtcagtgcgcgccggcgtagattatctgatgtgcagctacaacgcagttaatcaaacgcagacctgcgaaaacagtcaacttcttaacggcctggtgaaaggagaactgaactttcaaggcgtgttactgtcagattggacggcggtgctaaccaccgaacgtaccgccttggcgggactggatatgaacatgccgggttgggaattgtataatgccggactcccgagcgaaccggatccttcaaaagccacgtcatcttattggggcgtccgcttaatcgacgctgtacgcaacggtagtgtgccgatgagccgtatcgatgatatggtccagcgcgtaattagtacctattacaaacgcggtcaggacaaagaaagttttcctaaactgaattttcaatcagtgggtcaaggcaccgaagcggaacaagcggccaacaaccaacacgtaaacgtccaggctgatcatcataagctgattcgcgaaattggcagcgcgagcactattctgctgaaaaacctgaaccagaccctgccgctgaaagcgcccaaaagcctgcagtccattctaattttgggttcggatgcgggtgataacccgaatggagcgaacagttgtgaagatcgtaactgcaatgaaggaaccctagccggtggctggggctcaggctcggcgatttacccgtatctcatttccccagccagcgcaattcgtagctatttacacgcagatcacccgaatattaacctggacattgtgttaaatgacaccaactatgagcgtattgaagcatccgcatccattgccgaattaaccatcgttcatgttagcgcagacagtggcgaaggcaaagtggaaaccgaaggtaacgcgggtgaccgtaacgatctctatctgtggcacgaaggcgacaaactgatcctgagcgccgcaaaaatgtgtgccaatactgttgtcgttattcactctgttggtcctgtacttatggaagcctggattgatcatccgaatgttaccgctgtggtgtacgcgggtctgccggggcaggagtcagggaatgccgaagtagatgttctgtgggggaaagtaaacccgtcggcgcgcttgccgtttaccattgcgaagcgccgtgaggattatcctgcggatattatttatgagagcaatcagacggtcgtccagattgactacaaggaaaaacttgagatcgattatcgacactttgatgcacatagcattaaagcgtcagcgaccttcttccatcttgataaacagtttctgattttctcatttgtgaatttacagttggaacgcctgatcaaagattttacctctaatgagttaagcggttcacgcaaggacgcaatagaaattaactttaaggtcagcaacatcggtaaatgggatggtcatgaagtatcgcagctgtatgtgggttttcccgaccacgcggaagaaccgccgaaactattgaaaggctttgacagggtaatgattaagagcggcgaaagcgtgaccgtgtcgatcaaactacgcgttatcgacctgagcatttggtctgtgaagaaacaagcgtgggtggtgcctcagggagaaatgaaaatttgggtaggaagcagctcgcgtgacattcgcctcaataccaccttcgcggtgtga

SEQ ID NO: 670 - DNA, 2616 bp, Artificial Sequence
  6xHis UPI0002138E9C
atgcatcaccatcatcatcatgaaaatctgtattttcaagggtcgatgcatagcaagaatatgggcattagcggtcgtgcctttcttctgttcctgatgatccatccatcgataacaatgattgaaatcagcagccatccggtgcaagcagatattttgagccatgaagatcgtgtatatgatctggtaggccaaatgaccctggaggagaaaatttatgtcctggagagcgacttcttctaccgtgggtgcgaacgtctcggcattccgcgtatcgaaaccgccgatggcccctcgggggttgcgtcgtggggacttaaagggcgagcaaccgcatttccgtgccaactggcgttagctgcttcttggaatcgctctctggcccgtcacatcgggagcctatacgctaaagaatggcgtgcccgtggcatcaatgtattctacggcccgggagtgaacatttaccgttcgtcgaaagacagccgtaatttcgaatacatgggtgaagacccctacctcgcctcggagatggcagtaagcctgattaaaggcatccagcaaggtggggttatcgcaaccgttaaacattttgtcgcaaatgaccaggaattcgaccgttataaagtgagctcagaagtggatgaacgtaccctgcacgagatttactttcccccatttaaagccgcggtgcagcgtgccgacgtgaaagcagttatgatgggatacaatcttgtgaacggcatttattgtgctcagaatagatacttaatgaaagacatccttcgagactcttggggattcaaaggcactataatgtctgattggggcgccactcatgcggcgtatgaatcagttgaagccggactggacatggaactgggaacctttgactatctaaacaaagaaaaactgctgccccttatcaaatcgggaaaaatacgtgagagccagatcgatagcatggtaactcatattttcctgccgtgcttcgaactgggcattttcgacaggaaaactgtcaaagatacgagcatcccgactttcaacgaagaggcgaacaaagctgcatatcaggaagcgtgcgaagggatcattcttctgaagaacgaaaaaaacattctcccattggcaagccctaaaactattgcggtcattggtccgaacgcgaaccctaacatcgtagatgacaacgtttatgatgttaaaggtgccagttacggcggtggtggtagctctaaggtgtcaccgtggtacgtggtgaacgatatggaaggtattcgtcgggcctttcctaatgcacgcattctgtaccatgagggagtgagcaacgcgtacaaacgtaatctgttcaaacatagcagctttcagacgcaggaaggcagacgtggcctgactggcagttattatatgttagacgaacagaacccagaaaaggtgctgaagcccagcattcagcgtgtggatgcaaccattaacttcaattgggcggaggggagtagcgacgtaaaagcgctgggaaagaactaccgcatacaatgggatgggtacatcgcgagcgagaaagatgatagcgtggttttcctcgtggatgcgcaagggggttaccgcctcacggttgacggccgaatcgtgatcgatgagcgtaacagtcagtcgtttgccaatcggtatgtgcgcgtcgcgtcaaaacgcaacgagcgcatcagcgttcgtcttgaatattggaatcaaaacagcaacccagcggaaatacgtctggcgtgggattatgccagctctgtggacacgagtgaagctatccggattgcttccaaagcagactatgtgattttttgtggcggactcgatgcgtcgctagaatttgaaggcaccgaccgccagtttgaacttccgtatggtcaagacgaattgatcaacagtctcactaaagtgaatccaaacatcattgttgctttacatggcggtggcagtctgcgcatgacaccctggatcgatcatgtagcggcagtgattcacctgttatatccgggacaggaaggtggtaccgccttcggtgatatcttatctggcaaagtcaatccttcggcgaaacttagctttaccatcgaaaaggaatggaaagactcaccggcttacgggaactatgatgaaactcgtaaggaacgtaaagtgtattaccgcgagggaatctttgttggatatcgtggttatgaacaccagggcattaaaccgttattcccctttggtcacggtctgagctacaccaatttcgattatagcaacctgaaagttcaggtgattgatcgtaaaaacggctgcgtgaaggtcactatggacattaccaatacaggccagcgcgatggcgccgaagtggttgaattatacgtccatgatgcaaagagcaagctgaaacgtccgtacaaagagctgaaagattttgagaaagtgtttctgaaaccgggcgagaccaaaagcattgaaatgaacctgtgcaaagaagcgtttgagtactacgacccggacctgcataaatgggtgctggaaccaggcgtgtttgacattctggttggaagctcgtccgaaaacatccgcttaaaaggtaatattcggttgtga

SEQ ID NO: 671 - DNA, 1464 bp, Artificial Sequence
  6xHis UPI0002255A63
atgcaccaccaccatcatcatgaaaatctttattttcagggatcaatgtctagcccctccttccctagttcatttctgtggggagcggcaacctcagcctaccagattgaaggggcagtgcgtgaaggtggtagaactccgtcaatttgggatactttcagccacaccccaggtcgtaccgctggcggcgagcatggtgatatcgcggttgatcattaccaccgctttcgtgatgatgtagcgatgatggcggatttaggtctggacgcttatcgtttctctgtatcttggagtcgagtgcaaccaactggacgtggccccgccgtgcaggttggcttggatttctatcgtaggctggtggatgagttactggcccgaggtattaaaccggccttgactctttaccattgggacctcccgcaagaactggaagacgccggtggctggccagaacgcgaaaccgcgtaccgtttcgctgaatatgcacagattgtcggcgaagcattgggtgatcgcgtggagaattggattactctgaatgaaccttggtgttcagcgttcctgggttatgcgagtggagttcatgcgcctggccgtacagaacccgaagcatcattacgtgccgcacatcacctgaacctggcacatggactgggcactacagccttgcgcagcgtcatgccggcgcgcaacaccgtggcgttatccttaaatagctcagttgtacgcccgctcagccaagatccggctgatttggtagctgttcgcacgattgatgatctggcaaatggtattttccacggtccgattttacatggcgcctatccgcgtacgctcttcgacgcaaccgcacgcttaactgattggagttttgtgcaggatggtgacctggcggcaattcatcagccgctggatgcgctgggtctgaactattacaccccggcattggtgagtgccgcagctgaacgcccgtctggtccgcgggctgatggtcacggcgcctcggaacatagcccgtggccgggtgccgacgatgttctgtttcaccagagtcctggcgaacgcacggaaatgggctggtcagtggatccgaccggtctgcatgaattactgatgcggtatacccgcgaagctccgggcttagctttgtacattaccgaaaacggtgctgcatacgatgataaaccggacgccgaagggcgtgtgcacgatcctgagcgcgtagcgtatctgcatggacacctgtctgcagttcgacgtgccatcgccgatggcgcagatgttcgtgggtattacctgtggtcgctgatggataattttgagtgggcgtatggatatgaaaaacgtttcggcgcggtttatgtggattacggtaccctcgcccgtacccctaaaagctcggctcactggtatgcgcgagctgctcgtaccggaaccttaccggccgtagacgaagtgttttga

SEQ ID NO: 672 - DNA, 2367 bp, Artificial Sequence
  6xHis UPI0001D9FC40
atgcatcaccatcaccaccacgaaaatctgtatttccagggcagcatgaactggaaaggcattattggctatagcagcctgaagaaacgttttctcgtgctgactggtgtctgcttatcatcagtaacgcttttccctgcatacagtcagagcattgcgtctagcggcaaaaccaaaacggtgttaatctatgaacagtctaacttaccgctcgaaacgcgcctggccgatcttttaggccgcatgaccctggaagaaaaggtccgtcagctggatttttattcgggaactgattcactgctggatcgcggtagcaaaaattcgcttccgagcaaacagtcccctttttccactgccaaggctgatgcactcttcggtagccttggagcgggtgcaatacacgatctggatccaacccccgagcagtacaataccatacagcgttgggtgattgaacataatcgcctgcacatccccgcgctcttcatcgaagaaggcctgcatggattcgataccggtaccgtgtttccggccccgcttaatctggcgagcacctgggacccaagcgttgccgaaaaaaccggttcagcaattgcggcggaagcgcgcgcgaccggggttggtatgatcctggcacccgttctggacctggcgcgcgatccgcgctggggacgaattgaagaagatttcggcgaagacccgtacttaaccggacagatgggcttagcctacgtgcgcggtgcacaaggcgaatctttaaacaccgatcacaatgtggtggcggaacccaaacatttcgcggcacatggatctcctgaagggggcaccaacacctctccggtgcatattggcgagcgtgaactccgctcagttatgctgaaaagctttgaacctgcatttcgtcaaggacatgctatggcaacgatggcagcgtatcatgaaatagatggcatccccgtgacagcagatccgtacctattgaaaacaattttgcgccaggagtggggctttcagggtatggtcctgagtgacttaggtgcgattcgacgcttatatcagcttcatcaggttgcgtcgtcacctaaggccgcgtcttgcttagcgataaaaagtggtgttgatatgcaattctatgatttcgatcacgatgtgttccagaaagcactgatcgattgcgttcacgaaggctccttacctcaggcggacgttgaccgtgcagccagcgcggtactgcgtctgaaatttaccctgggcctcttcgatcgaccgtatgttgatccgaccctaaatgcgaaagcataccgcagcaagcctcatcttgacgtctcactgcagagtgcccgcgaatcgctcgtcctgcttaaaaatgaaaatggactgctgcctttttctaaaagcattcagcgcatcgcggtgattggtccaaacgctgatgttgcgcgttacggtgactacgaagaagaagccaacggcttgcatataagtattctgcagggtgtaaaagccgaagcaccccatgcacaggtggaattcgactcaggcaaagatattgcagcggccgtggcaaaagctaaatcggcggatgtagtaattctgggccttggcgaatggcgtgggatttccggtgaagcatttgatcgcacctctctagatctgcccggagaacaggaaaagctgttggaagccattaccgcgaccaataaaccggtggtactggtgctggagaatggtcgccctcttaccatcggctgggcgaaggcgcatgtgggagcgattgtggaagcctggtatcctggtgaattcggcggtcaggccattgcggagaccctctttggagacaacaatccggcaggccgactgacgattaccttccccaagactgtgggccagatccccgattattacaatactgatccctctagggcctatgatagtgatctgacacgccgtaaagtttatgttgacaatgacagccaaccgttatttccgtttggctacggactgtcatataccacctttcactactgcgatttgcaagtgaccccccccgccgccaaaagcaatgaagatgtcagcgtgacatttacagttaccaataccggcaccaaagcgggcgacgaggtttcacaggtttacctgagggaacagttcagtagcgtggaaacgcccgtccgctcgttgaaagccttcacccgtatgcctctacaaccgcaggaaagtcgtacggtaacattgaagattccgcgttcagagctggcggtgtggaatgccgatgaaaaatgggcggtcgaaggcggtaaatataccgtgtgggtgggtggctctagcgaagctgatttagccaaagagtttgatctccaaccctga

SEQ ID NO: 673 - DNA, 2550 bp, Artificial Sequence
  6xHis UPI00021F1FEE
atgcaccaccatcaccaccacgaaaacctgtactttcaaggaagtatgactccttcacaggcgacgaccgacctggtttcaaagttaacggtcgaagaaaaagttagcctgctggcggccgtagactggtggcgcaccccgacgattaagagagatgacgtgttcatacctcatattaagacctcggacggccctaacggggcccgtggagaaagctatgtaagcggtattaccgcagcctgttttccgtgttctaccgccctgggcgcctcatttgatcaggagcaagcgtatcgtatgggcgaggagattgcaaaagaaacaattactaaaagcgcgaatgttttgctcgctccgaccatgaatattattcgctccccgcttggtggccgtaactacgaaacttacagcgaagatccgtacctgattggtaccctggcgtcagcgtttgtacgtggctgccagagccaaggcattgcggcaactccgaaacattttgttgcgaatgacagtgaaaaatcgcggacaaaaatgacaagcaatattgatatgcagactcttcgtgaaatctaccttctgccgtttcagttggtgttaagggatagcgacccgtggtgcttcatgacctcatacaatcgtctgaacgaagaatactgtgcggactctcactggctgctggaagaaatcctgcgcaaagaatggggcttttccgggctcgtcataagcgactggatgggtacttattcgaccgctaaaagcctgaacgctggtatggacctggaaatgcccggaccgacgcgttggcgcggtaaaaaactgattgccgaaatcgaagccggtaacgttagcatggaggttctggacaagtccgttggccgtgtgatcgatctcgccaaaaaaaccggccgtttcgatgacccagttgaaaaacctgagcgtagcgtagaagatcctgcccgtatcgaatacatcaccgcagttgcggcggacgggatggtactgctcaaaaacgataacaatgtgcttccactgtcagaacacgactctgtagcggttattggccattttgccttacaaccgagtattggtggtggcggctcagcgaaagttctagcacagcacatcgttagcccgctccaaggtttaaaatcacgcggcgtaacctgccgcttcgccccgggcgtccctgtgtttggtgccttgccgcacgcagtcccggatagcatcagtgaagtgcaattgcgatggtttaacggttcagtggtgggcgaaaatcttgcgcatgagcagaccgtggcgctgccagaatacatgattaaagaagcgtggcctgattatctgcgtaaagattattgctcgtcaatgtcattcaacctgataccgaagacgagcggagatcatatcttttctgtgattactaccggcaaagcagacgtcattgttaacggcgagaatgtgtttcatcgtccccaagaacccgtcctgctcccggaatctttttatttctataaagcaaaaatcgaacgccgctttgcgttcaacatgaccgccggtcaggaatataacgtcgaactccgtagctgggcgaccgatgaagacgtcctctcacgcataggagggaccatgttccaaggcgcatcgctgcgcttcatggaacatattgacattccgcgtgccatatcggatgcggcagatgccgccggctccagtgatacggcggttgtatttgttggaactaccaatgaaatggaatcagaaggctacgaccgcgatacgatggatctaacctctgatcaatacgatctgattgcggccgtggttgcgcgtaacccacaaacggttgtagtgaatctgtcgggttcgccggtgaccgtgtctccattcattgaccaagtcccgacatttcttcaggcgtggtttgcgggccaagagtgcggccatgcgattgtgcgcgttctgttaggcgacgtcaatccgagcgggaggttaccgatgagctggcctcgtcgcaacgaagacaaccctgcctacccgaacttcccgtgtaacgatgacttggtattgaactacgaggaacgattaaaaattggctaccgcttttatgatgataagagcgcgccgacgccccagtttcatttcggccaggggttgtcgtacacaaccttcgcgttgaaaggtcagccgtccttcacgagctgctttagctctgcggaagaaaccgcggtgtctgttagtacgcaggtcgagaacactggtaatcgcgatggtaaacaagtcatccaggtgtatgtaaccttcccgtcatgcaacgtgaaccaccgtccggttaaagagctgaaggcctaccataaagttcgtgtgccggcaggccaggccaaaagtgtgatgttcaaactcgacaaatatgccttttcatactttgatgcggaggaaggaaaatggcgcattccggagggggagttcctggtccatctggcatttagctcaaccgaagtcctgcagacttttagtgtgaccaatgcgactccacaattttggacgggactgtga

SEQ ID NO: 674 - DNA, 2202 bp, Artificial Sequence
  6xHis UPI00026090A2
atgcatcatcatcaccaccacgaaaatctgtattttcaaggcagcatggccggcgatacaacggcgcctgcggagctggatagaccgtggaccaatacctctctctccccacaggaaagggcacgcgaattagtggcagccatgactctggagcagaagattgcccagttacacggggctatggataccatcgatatttacagcatgaaagccgataccgccgaaggtatggagcaactggcagcccagattcgtgtggaacgacacgtggccgcaattgaagagttgggtattcctcgctttcgtattaccaacggtccggtgggagtcggaatgggtgatggtaccccgtcacccccggcaaccgcgttaccgatgacgataggcctagccgcgggctttgatccggccttggcccgtgaatacgggaccgtaataggctcggaaacagcaacgctgggtcaacatgtattagaaggtccgggcgtgtgcttacaccgcacgcctatttcgggtcgcaactttgaatacttctcggaggatccgtatctgtctggggtaatgggtgtagaagttgcgcgcgccattcaagaacacggtgttattgcgatggccaaacattatgtttgtaatgaccaggaatatgaacgttttcgtgcggatgtggaggttgatgaacgtaccctgcgagaactgtatctgttgcctttcgagatgttggtgaaagatgccgatctagcagccattatgagcgcctataatcgcgttcgcggtacttatgcgacggagcaccgttatctgctacacacggttttacgagaagaatggggctggcaaggatacgttcagagcgatttttggtcatgtcgctcggcagcgccggccgttaatgcaggacttgatcatgagatgcctgatgctaaatggctgaacgaagataacgtaaaggcagccttggcagatacctcactggaaatcgaaactgtcgatcgcgcgctggttcgccgctatacccaaatgttccgcttcggccaattcgatcgaccgtatgatccgggtgaaatagacgcggaaggccacggcgccatatcacgccgtatcggagaacaaattgcggtgttgctgaaaaatgacggtgcggtcctgccgctggaaccgggcgttcagtccgtagttgtgattggacaagcgacttacgtggatgaagcctgcctgggtggtggtggaagcagtaaagtcgatcctctgtacactgtacgcccgatggatggattacgtgatgtgctgcagactttaggttcgtccgctgatctgcgcgaagtgaccgttgcggatgatctctcaaacctggcggaagcacaggcggcggcggcgaccgcggatgttgttgtaattatggctggcctggttgccactgaaggcgcggatcagccagacgcgcatatgttgaacgatcaagatcggatgattgctgaggtcggccaggtcaacgtgcgcacagtcgtggtactgaaggacggcaatcctgtgctgatgccgtggattgatgctgtcccggcagtgttggaagcgtggaaccagggtgcggaggacggtcatgtggtcgctgatttattgttcggcgtagttaatccggcgggaaaactgccgacgacctatccgcgcagctgggcggacactccgtttgcgggccatccagaacgctacccgggaactgacgaaggtgcaggataccctgtgttacgttactctgaaggccgtcagatgggatatcgctggtatcaggcacagggcatcactccgctcttcccatttggtcacggcttatcttacactaccttcgagttgtcggatctcgccgtatctccggaacggacggacggcgcggctcctttaaccgttcagctgaccgtagcgaataccggggatgtagcgggcgcggaagtggcccaagtgtatctagaattacctgaagccgctcaacagcccccgaaacgtctggtaggtttttgtaaaatttggcttgaaccgggtgcggcggaacgcatttcggtgacaatcgatcctgcggcaaccaaccacccgctctcggtttgggatgatggtgcacacgatttcgtcgttttaccgggagaatataccgtcttcgtgggatcgagctcggaagacaccccgttgtcagctaccgttactattgattga

SEQ ID NO: 675 - DNA, 2460 bp, Artificial Sequence
  6xHis UPI0002869F55
atgcaccaccatcaccaccacgaaaacctgtatttccagggttcaatgcttaagaatcagaaactactggaacaactgaccttaaaagaaaaagccctgctcatggcgggtcagggggaatggcagacacgtgcgataaaaggcaaactgaaaagcatctttctgtcggatggcccgttcggcctccgtaaacagtctggtgcgggcgatcatctagggctgaacggttcagaaccggcaacctgtttcccctctagtgcaacacttgcgaatagctgggatcccgctgtaggccgagcagtgggccgtgcgctcggacgtgaagcacgcagattagaagttgatcaggttctgggcccggcgctgaatatcaagcgcaacccccggggcggccgttcgttcgaatacttttctgaagacccgtatttagctggcaagatggcggctggcatgattcagggcctgcaggaaaacggtaccattgccacccctaagcacctggccgtgaactctcaagagacccgtcgcatggcttcgaacagcgtggtggaccagcgtgcccttcacgaaatttacttaaccaatttcgagattgcggtgaaggagggcaagccgaaatcaattatgtcatcatataacgagatcaacggctcctacgcgaacgaatcgaagtggctcctgactgatacgcttcgtaaagactggggttttgatggctacgtggtcaccgattggggcggcgataatgatcatgtgtcgggcattaaagcagggtccaaccttgctatgccgggattaggtgtcaatgcggccgaagaagtggttcaagccgtggaaaaaggcgagttgagcgaagaggtgttaaaccagcgcgttgatgaattattaactgttatactcgaggcccaggctaaacccgccgcgggtaactttagttgggaagaacagcacgccgtcgcgcgtgatgccgcgaaaaagagcctggtgttgctgaaaaataaagatcagattctgcctctggcaaaaggtaccaaagtggcgttagtaggcgactttgcaaaaaatccacgctaccagggcgcgggctccagcctcattaactcgcgtgatttagaatccttactggcaaccgccaaagattatccgattgatctcgtagggtacgcacagggctgtccgcgtcagggtgaagcgaaaccggaattactgaaagaagcgatgtcgctcgcagataaatgtgacgtctatgttgtcaacgttggtttagatgaatccgcagagagcgaaggcctcgatcgccctaacctgtctattcctccctgtcaggcggatctgttagaagcgttggcgaagactggtaagcctattgttctcgttttgagcggtggtgcggcgattgaactcccctgggagggtaaagtaaatgccattgtgcacgaatatctgggaggcgaagcgggcgcgtcagccgtgtgggaagtgctgactggaaaatataatcccagtggccgcctggccgaatcataccctttaaccgagaccgatatcccgtttgataacgagttcccggccgaaaaacataacgcgtattacaaagaatcgatctttgtcggttatcgctactatgaaaccgcaggcgtcaaggtcaagtatccgttcggctacgggctgagttatactacgtttgcatacagcaatttggagattgatgatcagggagcgagcttagatgttacaaatactggtcaggtcgcggggaaagaaacagtgcaactgtacattggtaaggaagactcgcccctgctccgcccgaaacgcgagctgaagggctgggcgcaagtagatcttgagccgggcgaaaccaaacgcattaaaatacctttcgacgagtacagctttcgctacttcgatcagtcgctcgagacctggcaggaagaaaagggccattatcagattatgctgggtcgtaacgtggccgatgtcgttctgacaggcgaatacgatttaaagcgcggcattgtgcctaaagagtctagcagcagctacggtaaataccgcgagggtaagcttttactcgtgacagatcaagatttcgcggatttatatggtgccaaactgcctaagaacctcccggctggccgccgtgagctggagtggaatgatccgctgcgcgaaatggccaacgccaaaagttggcttggtcgtgcggtcgccaaatggctggccaacaaaattcagcagtcactggatgaaagcaaaccggatctgaacttcctgtttaactataacatgcctttccgcgccatgacgaaaatgatgggtgatatgatctctcgtccgatggccgaggacattctttttatcgtgaatggtcacttctggcgtggcactggtcgcttaattcgcgattactttcagaataatcgtaaagtgaagaatgataaagacgttcaggaatga

SEQ ID NO: 676 - DNA, 2019 bp, Artificial Sequence
  6xHis UPI0002A93280
atgcatcaccaccaccaccacgaaaatctttattttcagggctctatgaccagctatccgaaagtgaacggcgcgtacgtggatgatcagaccaccttcctgaaagacatcctgcgtgatgagtggaaatttaaaggtctggtgatgactgactggggggcagcatcggcggcggtcgcgaatggcatccgtaatgggttggatttggagatgccgggtcctccgcatcgccgccaaccggcggtggtgcataaattgatcgaagatggcaaagtcgacgtggaagatattgatgatcgtgttctgccgctgctgcgtctgcttcgtcaaactggtaagtttaccgatcgtcgcgaaccagtaccggaacgtgcaatctctcgtccagaacatgaaaaactgatccgcgaagcaggcggtgagggtgttgtgctgctaaaaaactcagacgggaccctgccattaaaaccgagccatctgcagaacatcgcggttctgggtccgctggccaaacatgctgcagctcatggtggcggaagcgcatcccttaactgtcactataaaataagtccgttcgacgccatcaaatcgcgtttacctgatagcaaactgagctactctaaaggtgcgcatgtatttcgcgcatatccggatttcgtagcggggaccaaaaaccgcttgggaaacagcggattcgccgcggacttttatgagaacctggatctgattggtaaaccgttttatacggaagaataccctcgtggcagttttattaccctgatgaatgacaacgtggtgtcggcaaaaagcgcacggctttcgacagactactccccggatatctcaggcaaacactatttgagcttcagcggcatgggcccggcgcgcctgtttattaatggcgaattccagggagagattaaagaaaccgcagaagcgatgtcattcttgttaggtgtacaggaagagcaacacctacagtatgactttgtggttggcaagacatacagtatcgtgattgaatcgaccatttcgccggtcccgaatgcagaattgtaccttgcagatgaccagatcgccgtgcatctgggttttgtgagtcagcaggaaatggaagcagatctcctgtccgaagcggtgtcttttgcaaccgatgcagatgtggccctgatctttgtaggtaataccccgcagtgggaaaccgaaggtcaagatatggcaaccatgaccctcccggccgatggcagtcaggataaactcattgccgaagtagcgaaagtcaattccaatacgattgtggtaattacgaccggtgtgccggtggaacttccgtggctggacaacgttgctgcggtagttcaggcatggtatggcgggcaggagacgggcaactccatcttagatgtactgctgggcgaagtgaacccttcagggcgtctgccaatgtcatggcctaaaaaaaatgaacacaccgcgtgttacggtcatttcggactcgacagctgggatagccgtgaagttgaatatgtagaaggcgtgaacgtcggctaccgtcattttgattcccagtatggaacggaacgcgaagttcttttcccgttcggctacggccttagctattcgactttcgaacactcagcatgtgttttgtcaggtacgttagatgtgaacgacgaaaacgcgaaaattactgtagcggtaaccgtgcataacaccagtgatgtggcaggcagcgaagttgttcaggtctatgtaactccgcctaaaagccgcaccggtgtcgaacggccccctaagagcctcgtagcattcgataaaatccacttgaatccgggcgcgcagaaggaaattcaactctcatttaagcgcgatggcgcggcgttttggtcggaggcgggacgtctgtgggaagtggaagctggcgagcacgaagtacatgtaagcacctccagctgccctaaagatattaaatctaccttagtgttggatgtcacggaaggcttcacatttcggccatga

SEQ ID NO: 677 - DNA, 1422 bp, Artificial Sequence
  6xHis UPI0001BF8AF6
atgcaccatcaccatcaccatgagaatctgtactttcaaggtagcatgaccgcgaccgaagaacgtgatcctggtgcgggtgcatttccggccggttttgtctggggtactgcgactagtgcttatcagatcgaaggcgccgtggatgaggatgggcgtggcccatctatttgggatgtattttcacgtacaccaggtgccgttgctgccggcgaatcaggggccccggcgtgcgatcattataggcgctggccggaagatgttgcgcttctcgccggtttgggcgttggcgcatatcgcttatccgttgcctggccgcgcgtatttccggaaggggatggtcgtgctgatcgtcgtggattagatttttaccgtcgcctggtggatgctttgcatggtcatgatatagtaccatttgttaccctgtaccactgggatttaccccaagctcttgaagagcgcggcggttggcgcgttcgtgataccgccgagcgttttgcggactatgctgcagcggtccatgaagccctggacggcgtgccatactggatcaccctgaatgaaccgtactgtagcagcattgtgggctacgcggaaggccgtcacgctccaggcgcccgtgaagggcatggtgccctagcagcggcgcatcatttactggttgggcacggattagccgctgggagattacgagaacgtgcccgccaaggcgagcaggttggagtgacccttaatatgagtcccagtgttccggcaggtccttcagcagaagatgccgcggctgcccgtcgtatggatttaatggtaaatcgtcagtttaccgaacccctcctgggagcggcgtacccggaagatatgagtgaggtgtatggcgaaattagcgatttttcattccgtcgcgatggcgatttagcgctggtaagtgcaccgttggattttctgggcgtcaactattactacccgatacatgctgcggcagctccttacacacagcctgatccggccctgcgtagcgctttcgatattggtgttcgtacggtggccccggatggtccgccgacctcaggcttaggctggcggatagaaccgcgtggtttacgtgatactctgaccggactcgcagctcgtcatccaggtcttcctccggtattcatcaccgaaaatggttatggggatcgtggagaaactgatgatactggtagagtggactacctccgtgaacatctggcagctactgcagaagcgattgccgaaggtgttgacgtccggggttatttttgctggagcctgttggacaatttcgaatgggctcgcggctatgatgcacgcttcggcttagtccacgttgattatgcaacccaagcccgtacgccaaaagcgtcttatcattggtatcgagactttattgggggtcacatgtga

SEQ ID NO: 678 - DNA, 2277 bp, Artificial Sequence
  6xHis UPI00019F252A
atgcaccaccaccatcaccatgaaaatttatactttcagggatctatgaaaaaagagaaattagaggccttatttcagaccctcacactggaggaaaaaataggtcaggtcgtgcaggtttccggcaatgtgtatatggaggataaacagacgattgacaccggcccattgcaagatatcggcttccacagcgatttccaactcgacttaatcggctcggtttacaatgtaaacgattggcgccagattaaaaaaatacagaccgagtacttacataaacaccccaaaaagattccgctgctgattatggcggatgtaatttacggcttccgaacgattaatccgattcctctggcgcaagcgggttcctttgattttgaactgatccagaaaggcgccaccgagacagcaaaagagtcctatcgtaacggtctgcacgtgttattttccccgatgctagacctggtgcgtgatccgcgctggggccgtgtgatggaatcaccgggcgaagacgtttatgtggccagtcagtatgcaaattctattgtgaccggctaccaaggtgaattaaatgaagaaaaaaccattgaggaagatcatgtggccgcgggcatcaaacatttcgcggcgtacggcgcgcccgaggccggtcgcgaatacaattcagttgatatgagcttgctcaaacttcgacaaacttatttaccgccgtatgaggcggcattaaaagcgaacgcgaaactggtcatgacagcattcaacctcctcaacgggattccggccactgccaacaagtttctcaatcgcaaaatcctgcgggaagaaaataattttgatggtgtgctgatttcggacttcgccgccattgaagaacttgtcgatcacggttacgctaaagataagcagactgcggcacaaaaagcgctggaagcaggcgttgatattgacatgatgacatcatgctatgcgaacgaactgcaaagcctgatcgaaagtgatcaactgcctatggaacttctggacgaagccgtgcgccgcatcctggttcttaaaaatgagttggggctgtttgaaaacccataccgcggtttagaagccgaaaccgccggcgaaattttgaccgcgacggcaaaacaaacggcgatagagctggtggagaaaagtagcgtccttctgaaaaacgatcagcaactgccgctagagaaaccggaaaaattagctgtgattggtccctacggcacgtctaaactaaccctgggattctgggcgtcagtgaccggatctccgctggatacgatttcactggcggaaggcctgcaacagcacttcccgaatcaacagttgttgctgagcaagggatataatttattcgatgactatgaggcattcggcccgctgaaagaagcggtgatccagctgaacggtccgattgatgccgaaaatgaacttgtgcaggaggccgttgaaaaggcgaaacaggcggacaagattctcttcaccttcggcgaaaactttatggaaagcggggaaggcgcatcgaaagctcatttagacctgccggagaagcagctgcacctgttgcgtgagctcaagaagaccggcaaaccgatagtgggcattttgtataccggtcgcccgttggttttgacggaagtagctaccctgttcgactctctgctgttggtttggtaccctggcacgatgggcggtatcggtatttcgaacctgctgactgggaaagcaaatccgagcggtcgtttagcgatgacgtttccgcgtgcagaaggccagattcccatttactatgcccatcatagcacgggccggccgatgggtacaagtaaccaacaaccgcgcttcacctcccgctacacggatgaggccaacgagcccctgtatccttttggctacggtcttagctattcgtcttttcagattacgaccgacagcgcggccgtgcattgtcgtgcgggcgataccttttcgttcaaactggctattcagaatactagtcaggtggacggcgaagaagtcattcaattctatattcaggccgcagcctcggagattgttcgtccggttcaggaactagtcggtagcaaacgtatttttgtccgtgccaaaagcgtggaggaagtggaaattgaggtcgattcaaattcactggggtatgtcaacgagtcgggcgagcatgtacttgaaaaaggatcttatcgatacctgattgctaccagctcagacaacgtgcacaagagcatttcgatcgtcattgaatga

SEQ ID NO: 679 - DNA, 2172 bp, Artificial Sequence
  6xHis UPI0001F11EFF
atgcaccaccaccatcaccacgaaaacttgtacttccaaggttcgatgaacgagaagaacctgctggaactgatgaataacctgagcatcgaagaaaaggtgggccaactcattcaaattactccggactttttcgactcagagggcgaagttacaggtccagcacaggcatggaacctggataaacgtaccctgtaccaggtcggttcggtattaggcacccacacccgcgagcaggtcgagatgatccagaagaattatctgcagcgcagcaaacacaagatccctttgctgtttatggccgatgtaattcatgggtacgaacatatttttccaattccgctggcgttagcggcgagtttcgacgagaaggtcgtagaaaaaatggcgcattacagcgccaaagaagcagcggatgcgggtattcacgtaacgttctcccctatggcggaccatgttactgatgcacgttggggtcgcgtattagaaagctcaggggaagatccccgtctggcagcacgtctaaccgcagcgtacgtgcgcggttaccagggcgagagcctgaatgatccgaataagattgcaagttgcgtaaagcactttgtgggttacggcgccgcgaaaggcggtcgtgattataacgaggcgaatctgtcggatgttgaactataccaaaactatctgccagcgttccaacaggcgattgaagccggggccaaatttgtaatgaccgcgttccaaagtgtgagcggcgttcctatgacagcaaatcgcccgcttattcagcatgtgttgcgcgaactgctgaaatttgagggcgtcgttattagcgattggggggccgtgcaggaactctgcgcccatcgcgtcgccgaaaacagctcggaggctgcaaagctagcgtttcaggcgggcatcgagatcgaaatgatgagcaactgctatcatgaacacttggaacaccttgtcagcgagaacggttgggaggaattattagaccaggtggtttggcgtatcctgactgtaaagaacgaactgaacctgttcgaaaatccgtatcggagcatgaatagccgcgtgcagtctaacgaatacaggaaagtgaataatgaaattgccctccgcaccccggttcttttaaaaaacgaacaccaggtgctcccgctgaagaaaaatgagaagattatcttactgggctccaaggcagatagccaggacgttctaggagcgtggtcgtggattggcaaacaagaaatggcaatctccctgaaacagggcctggtggacggggggaatgataccctgacgttcattaaagggactccgtccgagcgtttgcaggatgcggaagtcgtaaaggcgattcaagaagcggacaaaatcattgttgctattggggaaaccagcggagagaccggggaggcggcctcgaaagtgcatctgagagtaccattcgaggatcagctgtggctggacgagctgcataaaatgggtaaagtgactattgccgtcatcttcgcggggcgtccactggttctgactgacatcgagcccaaagttgacggactggtaatggcgtggtttccgggcagtgaagcgggtcacatcctcgcgcagctgctgacgggtgatttcgatttcagtgggcgattaccgatgagcttcccgcaaaacgaaggccaattaccgctgacctaccagcagatggagacgggacgaccgttaacgcagacgaactaccaggagaaatatcttagcaaatacttagattgcagcaacgatccactctatgaattcggcttcggcttacagtatgcgactgtttcatggaaaaacattcagttgtccactaaccaattgtccgacgaatgtagcacccgtttaacgatgactgtgtcaaacgacaccgacatccagacacacagcattgtacaactgtacatgcgcgacgaggtgaccaccgtcgtacgtcccatgatcgagttgctagatgtgaaggtggtgaaactggaaccgaatcagaaagtcattgttacctttaccatcgataaaaaagacctgcagtacgttcatgcggatttgaccaaacagattgaattgggcaaagtaaccttcttcattggcgaaagcagtaaacggatcgtgtggagcgcgccttgcttcgtgggctga

SEQ ID NO: 680 - DNA, 2682 bp, Artificial Sequence
  6xHis UPI000203D9EA
atgcaccatcatcatcaccatgaaaatctctatttccaaggctccatgaaatattttctctgtttcttactgcttatccctattaccaacacctttggccagctgtacaaagatagtacgcagtcagtagatgtgcgcgtgaaggaccttctgtcaagaatgaccccggaagaaaaattttggcaagtttttatgattccgagcgatggcgacacgaccaatgaaaaactaaaacacggtatcttcggccttcagattagtgcaggcagcggcggcgatgcgggcggacagctgctgaactacaacaccacagaaaatgccacaatcctcgcgaagaaggtaaaccgcttacaagcatatttcgtgacacagacacgcctggggattcccataattccgtttgacgaggcgctgcatggccttgtgcgccacggtgcgaccgcatttcctcaggccattggcttagcggccacgtgggataccacgctgattcatcaagtggcgacccagattgccctggaatgcaagatgcgcggcattcgccagattctgagcccagttgttaacctggcgacagatgttcgctgggggcgtacggaagagacgtatggagaagatcccttcctgacgagcgagattggcctggcatttatacgctcgtttgaacaacagggcattatcaccacaccgaaacatttcattgcgaatgtaggcgatgggggccgcgattcctatcctattcacctgtcagaatggtatctggagcaaagccacctgattccgttcaagcgcattattcgtgaaggcggcgcgcgttcgatcatgaccgcctataatagcttaaacggcaccgcgtgttcaagcaatgactggctgcttaaccagaaactgaaaaagcagtggggtttcaaaggttttgtgattagcgatgccaatgctgttggaggtgaggtagtgcttcataacaccgcgagcagctatgcggaaagtggcgcccatgccattaacggcggtctggacgtgatcttccagactgactataaccatgcggccctcttttaccctgctttccaaagcggcctggtcgattctaatcgtttaaatgacgcggtgagccgtgttctgcgcgccaaatttgaactgggactgttcgaaaagccatacattaccattcccaaaagcagcaactctatcagcagccagggtaagaagttgtcccagcaggcggccgaaaagtcgttcgttctgttgaagaacaagaatcaagtcctgccgctcaatccgagcgttcataaaatagcattgttcgggatggacgcttcacagcctcgcttaggcgggtatagcggaccgggaaataatccgttgtccatcctggatggattaaaagccatcgcgggcgattctatccagatcacttaccaggaaactgttagctacagcgatacacttttcacgccgatctacgataagtatttggagaacgaaaccggaaacgggcttatcggcctttatttcgataatgtgaacttcacgggcaacccggttctaagtcgtaccgactcccagattgattttaattggaccctgtacggtccttcgaatgagcttgaaaaccacttttatagcgtcaaatggaccggcaatttgattgcgccggagtctggtaagatcgatattgggcttgaaggtaacgatggctaccgcctgtacctaaatgataagatcgtgatcgaccgctgggaaaaaaccagctatcaccaggatttaatcccgattgatttcgtcaaaggcaagaagtaccccatccgtattgaatttaaggaaccgaagggtaacggcaaaatacgtctgatctggaattactcaattaatagcagctttgactcagagctgaaaaaagcaattaaggcgacgaaaaaggcggatgttgccgtcattgtcgtgggtattcacgaaggtgaatttcaggatcgcgcctcgctgcgtctgccgggaaaccaagaacgccttattcaagaactgcataaaaccggcaaacctatgatagttctgcttgtaggcgggagcgccattacgatggatgaatggatctctgacgcagacgccatcgtgtccctctggtatccaggtgaagccggcggcttagccgtcgctaacctgctgactggaaaaataaacccggcgggtcgcctgcctattacgttccctatctcggaagcgcagcttcccctgacgtacaatcatctgcccactggtcgttcggatgattactacaacttgtcaggcgaaccgttgttcccattcggttatggtctgtcgtacacgcagtttagctactcggatcttaaactcgcggaaaataatatcacgaaagatgaaagcgtcgacttgagttttaaactgaccaacaccggtaaacgtgccggggaagaagtggtgcaactgtacattaaatctaaaggatctgcgcaggcacagccgattatcgcgttgaaaggctttcagcgcatcagcctgaatagcaaagaaagcaagattatccacttcaccctgaacccacagctgtttacccacattagcccggacctgaaggagattattgaatcaggcaattacgaactgctgatcggctctagtagccgcgatctgcaactaaaggccgtccttacaatccaatga

SEQ ID NO: 681 - DNA, 2313 bp, Artificial Sequence
  6xHis UPI00020CA641
atgcatcatcatcatcaccacgaaaacctgtactttcagggtagtatgagtttagttcttcagcctgcattggcggatgatctgtttggcaaccatccgttgacgccagaggctcgtgatgccttcgtgacggatctccttaaaaaaatgatggtagacgaaaagattggtcagctgcgcttgatttcggtaggccctgataaccctaaagaagcgatccgtgaaatgattaaagacggacaggtgggagcgatctttaatacggtgacccgtcaggacatccgcgcgatgcaggatcaggttatggagctgtcccgactgaagatcccgttgttcttcgcgtacgatgttttgcatgggcaacgtacggtctttccaattagcctaggactggcaagctcttttaatctggatgccgtcaaaaccgtgggccgtgtgtctgcgtatgaagcggcggacgatggtctgaatatgacctgggcacctatggtggacgtatcgcgtgatccacgttggggacgcgcaagtgaaggtttcggtgaagacacatacctgacctcgattatgggtaaaactatggtagaagcaatgcaaggcaagtcccccgcggatcgttattcagtgatgacgtcagtgaaacattttgccgcgtatggcgccgttgaggggggcaaagagtacaacactgtggatatgagcccgcaacgcctttttaacgattatatgccgccgtacaaagcaggcttggatgcaggcagcggagcggtcatggtagcgctgaatagtctgaacggtaccccggcgacctcggattcgtggttactcaaagatgtcctccgtgatcaatgggggtttaaaggcattaccgtctcagatcatggtgcgattaaggaactgattaaacacggcactgcagcagatccggaggatgcggtacgtgtcgcactcaaatcgggcattaacatgagcatgagtgatgagtactacagcaaatacctgcctggtctgatcaagagtggcaaggtaacgatggccgaattagatgatgctgcacgacatgtgctcaacgtgaagtatgacatgggcttgtttaatgatccctactctcacttaggcccaaaagaatcggatccggttgatacaaatgccgaatctcgtttgcaccgtaaggaagcgcgcgaagtagcccgtgaatcgcttgttctgcttaaaaatcgcctggaaaccctgccactcaaaaaaagtgcgacgattgctgttgtgggcccgctagccgattcgaaacgtgacgtaatgggctcgtggtcagcagcgggtgtggccgaccagagcgtaacggtgctgaccggtatcaaaaactcggtgggtgaaaacggtaaggtgttgtatgcgaaaggtgccaacgttaccagcgacaagggtattattgatttcctgaaccagtacgaggaagcagttaaagtagatccccgtagtcctcaggagatgatcgatgaagccgtgcagacagcgaaacaaagcgacgtggtggttgccgttgtgggcgaagctcaaggtatggcacatgaagcatctagtcgtacggatattactattccccaaggtcagcgcgatttgatcgccgcgctgaaggccaccggcaaaccgctggtcctggtcctgatgaacggccgcccattggctctggtgaaagaagaccagcaagccgatgcgattctagaaacgtggttcgctggcactgaaggagggaacgcaattgcagatgtcctttttggagactataatcctagcggtaagctgccgatgagctttccgcgctccgttggtcagatccctgtgtactactcgcacctcaatactggtcgtccgtacaacgctgataaaccgaataaatataccagtcgttactttgacgaggcgaatggcgcactgtatccctttggttatggcctatcgtataccaccttcaccgtgtcggatgtaaaactctccgcgccgacaatgaaacgcgatggtaaggttacggccagcgtacaggtaactaacactggtaagcgcgaaggcgccacggtggtccaaatgtatctgcaggatgttaccgcaagcatgtcgcggcctgtgaaacagctgaagggctttgaaaaaatcacgctgaaacctggcgaaacccagaccgttagtttcccgatcgacatcgaagcgttgaagttctggaaccaacagatgaaatatgatgcggaaccgggcaaattcaatgtcttcattggtaccgattccgcccgcgtgaaaaaaggtgagtttgaacttttatga

SEQ ID NO: 682 - DNA, 2349 bp, Artificial Sequence
  6xHis UPI0002189080
atgcatcatcatcatcatcacgaaaatctgtatttccagggcagcatggcccaaagcgatacgtatttagaccccgcagcgccgattgatgaccgtgttaatgatctgctggcgcgtctttcggtgcaggaaaaggccggtcaacttacccagtacttttatctgcgctcgatgcacccggccagcgacggagcggatccggcggatctgccgaccgaacatcgtcgtccgcctagccagcctgcgatggtggaggcggaaattcgcgcaggacgcgctgggagcgtactgttcgtacgtgacccggcgacccgtaacgaattgcagcgactggcggtggaacatggtccgcatcgcatcccgctcatttttggttacgacgttattcatggtttgcgtaccatcatgccggtaccaatagcgatggccgcgtcatgggatcctgcagtattagaagcggcacaggccagcgctgcggaacaggcccgtgcggttggcatcagctggacattcgcaccgatggtagacattgcgcgggacccacgatggggccgtattgttgagggtgccggcgaagatccgtatttgggtgcggcgtgcgccgctgctcaggtacgtggattccaaggtggtccggatatcggtcgcgagggccgagttttagccggaccgaaacattttgcgggctatggcgcagcccgtggaggtcgcgactatgaagatagtgagatcagcgataatgaactttggaatgtgtacctgcccccatttaaagcagcagtggatgcgggagcaggtaacgtgatgagcgcctacatggatttatgtggtgtaccggcgtgtggaaatcggtggctgctgaccgacgtcttgcgtggtacgtttggtttcgaaggtttcgtggtttcggacgcggatgccgtgcaatctttaaccacacagcattttgcagaggacctgaccgatgcaggcgcaagggctctgatggccggcttggatatggaaatgggccgggacgatgctgcctacaaacgcttacccgaagcgctgggcgccggactgatcacggtggaagcactcgataccgctgttcgtcgtgttttgcgtgcgaaatttgccatgggtctctttgaaaacccatacgttgatgtggaggctgcccccgcggtactcgccgatccagctcacagacgcgtggcacgcaccgccgccgaaagcacattggtgctccttaaaaatcgtccggggcccgatggaagtcgtgttcttccattaggcgcccgtggctcgatagcggttgtaggacaattagctgattcgcccagggacaccttaggcccatgggtatttgactatgatcccgccgaggtcaccacgattcttgcgggaattcgtgaacgcgcagggagcgatgtgcgcgtagattacgctgtaggcgaatgggctccgccccgtcgttttccgtccatgtttgatgaacaagaacccgccggctcattaccggttcgtcctgacgattttgacgacgaagcggctattgacgaagccgtgcgcttagcctctggtgcaggcgttgccgtcgtagtagtgggccaagctcagaattgtattggagagaaagcctcagtaagtaccctggaattacccggtcaccagctagatctcctgactgcagttgccgcgacgggcacgccaacagtagccctcgtgatgtcaggtcgccctctggatatgcgttgggccgatgagaatttacctgcgattatgcaggtgtggtaccccgggacctgtgggggtcgtgctgtcgccgcggccttatttggtgatgtcgatccggctggccgtctcccttttacgtggccgcgcactgttggacaggttccgatgatctactcgcatgatcgcacatttcagccagaaggcgccggtgagcgctactgggacgaagaaagcacgcccttatatccttttgggcacggcggcagctatacctcgtttgagtattctcgtccgcgtgtttccgcgcagactatagccgtgggagaagctgtgtccgtagacgtggatgtaaccaataccggtgcgcgcgacggcgaggaggttgtgcaattatatatccatcagcgacatggtcgttcaagccgccctgtccgtgaactgaaaggttttcgtcgagtggccgttcccgccgggcgtacaattacggtagaatttggcttggggccggatgaactgtcgtattggtctgccgccagccgtacccatgtgcaagacagctcaaccactgtagatgtatatgtgggcggttcttcattggcggaagcgacgaccagtttcgaagttcgctga

SEQ ID NO: 683 - DNA, 2547 bp, Artificial Sequence
  6xHis UPI00022EBE5A
atgcaccaccaccatcatcatgagaatctgtatttccaaggtagtatggttgtggaacttgacgtagaagctctgctgaaaaagctgacaaacagcgaaaaggtagatctcctggcgggaattgatttctggcataccaaagccctgcacaaacatggtatcccgagcgttcgccttagcgatggtcccaacggagtacgcggtacacgcttcttcgatggcgttaaagccgcgtgctttccttgcggcactgccctgggagcgacgtttaatacggcgctacttgaggaagccggtcgtaagatgggagaagaagcaaaactgaaaggcgcgcattgcatactggggccgactattaatatgcagcgcgcgccgttgggtggccggggtttcgaaagtattggcgaagaccccgtgttggccggcctgggctcggcggcgatttgcaacggtattcagtccacaggcgttcaggccaccccgaaacattttgtgtgtaatgatcaggagcaccgccgcaatgcggtccaatcaattttgaccgaacgcgcactgcgtgaaatctacgccatgccgtttcaactgacggtgcgcgattctaagccaggtgcctttatgaccgcttataatggtgtgaacggtgtgtattgctctgaaaatcccgacatcctagaaaaaatgctgcgtaaggaatggggctgggatggtatggtcatgagcgattggtacggtacctatactaccacagatgcggcaaatgcgggattagatctggaaatgccgggaccccctcgcttccgtggtgaattacttaagttttcggtttccacggacaaagtgaagcagcatgtcctggacgagcgtgcgcgcgcgatgctggtctttatcaaagaatgcatgaaattaggcattcctgaaaacgccgaagagaaaaccggtgataccccggaaactgcggagctgcttcgtcgtatcgggggcgaatcgctggtactgttgaagaacgagaattctgttctgcccttgaagaaaaacaagaaaactgtgatcattggcccgaacgccaaaattgccacatatcatgggggtggcagcgcaagtctggccgcttactacgccgtaaccccgtttgatggcattagccagaaactggagtcagaaccgatatatgcccagggtgcctattcgcacaaactgctacctttattaggcaatgtcgttaagtcaccgtcgggcgaaagaggtatggtgtttcgcgcgtacacagatccgccgaacgttaccagccgcaaaccggtagacgaacgcattctgaccaatacagagctgaatttggtcgattattatgtgattaaaaacccgctgtggtatgcggaagttgagggctcatttgtggcagaggaagattgcgaatatgaacttggcctcattgtctgtggcaccgcgaaccttttcgtgaacggaaaactggtcattgataatgaaactaaacagcgccaaggggacgcgttttttggaacggccaccgtcgaagaacgtggcaccacagaactcaaaaagggggagacctacacattcaaagtccagttcacctcagcgccggcaagtaaactgcagggaaacaatgttgtattcggcgggggtgccctgcgtatcggcggttgcaaagtaatcgacgataaagaagaaatccggaaagcggccgaactggcccgagatgccgatcaggtggttatctgttcaggtttaaatgccgattgggagaccgaaggacacgatcgcgaccatatggaccttccgggctatctcaataaactgatctcgaccgtgggtaaagcaaatccaaacaccgttgttgtgaatcagagtggcacgcccgtgaccatgccttggattaatgatgtggcggccgtaattcaggcgtggtacggaggtaatgagaccgggaatgctattgccgatgtgttattcggggatgtgaacccttcaggcaaattatcactgagctttccgattcgagtccaggataacccggcgttcctcaattaccgagcggagttcgcccgcacattttatggtgaggacgtttatatcggctatcgcttttacgaatatattgaccgccctgtccttttcccctttggccacggcctgagttataccacctttgaatttagtgatctggcggtgagcgatcaaaaccacaatttaaaagtagagctgagcgtgaagaacacaggttccatcaatggcgcgcaggtgatacaagtttacgtagctccgcgtcagaaagccactaaagttaatcgtccgctgaaggaattgaagggcttcggcaaagtggccctggaagcaggcgaaaccaaaaaggcgactatcaacctgtcaccaaaatatgcggccagctactgggacgaagatcgccatcagtggtgcgcggaagaaggcgaatacgaaatcatagtggctgatagcagcgtggtgactgataaggctttacgtggatcattcacggttgcggaaacctattggtggtcaggtgtctga

SEQ ID NO: 684 - DNA, 2418 bp, Artificial Sequence
  6xHis UPI00023ED5A8
atgcatcaccatcaccatcatgaaaacctgtactttcagggaagcatgaccactgaacaagtaaccccgccgtggcgcgacccgagtctgcctgtagcagaccgtgtggaagccctgttggcggccatgacactagaggagaaggtggcgcagttgggctctcgttgggtaggcaacgatatgggggatacgggggaagatcagggctatgatccggaggaacagcataacgtggcgccgatgcaagacgttttcgcagcaggaggtagcatcgctcttgccgatgctgcgcgtcatggtttgggccacctgacgcgcgtgtatggcagcgttccgcgtaccccggcggaaggtgctgctgaactggtggagcagcaacgtgtggttatggcgtcccgccttgggattccagcaatcgtgcatgaggaatgtctgactggctttacggcgtttggagcaactgtgtaccccgcagcgattgcatggggggcgacattcgatccggaattaattgaacgtatggccgcagccataggtcgcgatatggcggccttaggcgttcatcaaggcttatctccagtgttggatgttattcgtgattatcgttggggtcgtgtagaagaaactattggagaagacccctatttagttagcctcatcggtgcggcctacgttcgcggccttcagtcggggggggttatagcaacactgaagcactttgcgggatacagcgcttcacgcggtgcgcgtaatcatggcccagttcctatgggtcgtcgcgaattaaccgatgtcgtgttgcctccattcgagaccgcgattcgtgccggcggtgcccgctcggtgatgaactcatattctgatgtagacggagtgccagccggtgcggacccctggttactgaccgaactgcttcgtgatgaatggggtttcaccggcaccgttgtttcggactattgggcggttccattcctcgctaccatgcacggcgtggccgaagacgacgtagatgctggtgcgcaggctctgattgcggggatagatgtggaacttccggacaccatcggcttcggtgcaggattgatcgaacgtgtacgtcgcggtgaactatcagaacgctatgtggatcgtgctgcacgtcgactgttaacccagaaagcggaactcggcttactggatccagactggtcccccgaaaaatcggtggcggcggccccgttgacagacttgaatgcagcgggcaatcaggcgctggcggcagaacttgcggaacgttcgattgtcctattggaaccaggtacagctctaccggtgactgccgcaggccgtattgctgttttgggcccctgtgcggatgatgcgcgaacctttttaggttgttatgcctttcccaaccatgtcttaccacgctacccacaactgggtttaggtcttgagatcccgaccgcgctggatggacttcgcgctgaatttccggcgggagagattacttacgcccgtggctgcgaggtaacgggggatgatcgtgggggttttgcagcggcagtggagacggctcgtgatgcggatctggcggtagcgttcgttggcgatttggcaggcttattcggcaagggtaccagtggtgaaggctgtgatgcagctgacctgcgcctgccaggtgttcagcctgaactgctagaagaactgctggcgactggcacgccgctggttgtggtggtggtcagtggacgtccgtatgcgctgggcgatctggatggccgagtggcgggattggtacaggcgtttatgccaggccaagccggtggtgccgcgattgccggcgtgttgtctggccgcgtacagcctgcaggtcgcctgccggttcagatcccgcgtcatccgggtggtcagccgggaacttacctgcagccaatcctcggcgcgacgcacgccgaagtgtcaaacctggatccgcgtcctttgtatgactttggatatggacgctcgtataccgcttttgccgttggtgatttacgcgtatcagcagacaccgtgccgacagatggtgaatttaccgtgacggtccgcgtgcgcaacacgggtgaacgtgacggcgctgaagtcgtccagttgtatctggcggatccggtggctcaagtgacacgtcctgtacgccagctgtcaggttttcgccgcgttgaactggccgcgggtgcggcggcggatgttacattcaccgtacatactgatcgcacagcgtttacgggtcgagatttacgtcgcattgtggaaccgggcgaattgcgtatcttagtgggcacctctgccggcgatctgccatgctcggcaaccgtacgtttaaccggaccgactcgagccgccggagccgatcgtcgccttaccaccggtgtccaagtgcgcccaattgccagctga

SEQ ID NO: 685 - DNA, 2592 bp, Artificial Sequence
  6xHis UPI000023EA29
atgcaccaccatcaccatcacgaaaatctgtattttcaaggcagcatgggctctatcgacaaggattacgccccgtcgcgtctgccgttagaagatagcgtgagtctcttgagcggcgaggacttttggcgcaccacgcctaacaaagcgctcggattaggatcacttaaattttcagatggtagcaatggcgtacggggggaagattggattaacggcgcaccgtccgccgcgatcccatgtggcacagccctgggtgcgtcgttcgatgttgaactcgttagccgtctgagtaacttactggcccgtgaatgtaaacgtaaaggggtgcatggcctgctggctccgaccatgaacatccaccgctaccccctctgcggtaggaacttcgaaagcttcagcgaagatcctctgctgagcggtctgattgcggcttcttttgttcagggactgcaggcacagggtatagcaaccagcccgaaacatttcctcgccaacgaggctgaaaacggccgccgttggagcgatagtgtgatccaggagcgtgcgctgcgtgaaatctatttagaaccttttcgtattgtagtgcaaaaagctgatccgtgggcgattatgacggcgtacaactctgtgaacggctcattttgcagtgagtctaaaaccttactatccatcctgcgtggtgagtggcactataatggtgtcgtgatttccgattggttcggcacctactcaaccgtggaggccttctctgccggcttagatttggagatgccgggtcctaccaaatttcgcgaacaggacaaggtcctgggactcctaaagcgcgacgaaatcgaaaagcgccagatccgcgacagcgcgagccgagttcttgatctgttacaaaaaaccggtcgtatcggccaaccgggtcatccgccgccatctaaagccgaggaaccggaatacttggacaacctcgaaactcgcactttgctgcgtcaagcagcagaaagctcgatggtactgctgaaaaatgagggtagtaccttaccattagttaatcggcgtactaagctagcagtattcgggcgccatgcaaccgaaccttccctgtttggaggcggaagtgctagcattaaagtaccctactcctcgaccccgtgggatgccattcaggaaacatatcacgatgccgcacttggccccggtgtagcaatcgagcgtctggtgccgttaccaaatgagtgtggcctagaactgggcgatattacccttacctggtataacggggataccgtgagtgatagcgctcgattcttttcacaacagttaaaggatactctgtatatgcttgtggaacatgcccccggtggcctgatcgatcgctcgaatttctgcacgagcatgaaattcgtttttaccgcgcagcatacgggcccattccatattagcttgtcaggaccagggaatgcccagtgcctggtggatggcgaaatcgtgctggatgtgcagcgcgggctcgatatcagcaccgaagattttctgtttgaccgttcgaaactggaagtttcacgcgataaacctctgcagttgcaagcaggcttacgttacaactttgaagtcgttaactggtcaagcaaacataaggcccagaacgtgaaccgcgagtttttcattcagggctgccgcctgggtctgagccccgcccgcgatgatgataaggcgcttattgacgcggaacgcctcgtcgagacggtggaaacctcaattgtagtcgtggggaccggtacggaatgggaaagcgaaggctttgatcgcgtatcaatgcaattgccgcgtcgccaggatgagttaatcctccgggtagccgaaaaatgcaaaggccgtacaatcgttgtggttaatgctggtagcccgatagatatgagcggatggatcgaccatgtagatgccgtagtttacgcatggtttccggggatggaatttgggagcgcattagcgaggctgctgtcaggtgaagtctcgccgtgtggccgtctgcctaccactttctgggataaagttgaagactacccggcggggtacgtggaggaactcatgaccgccgatcgtaagatccagtatcgcgaaggtgtgttcgtgggctaccgccaagaatcgttacagtcctacacccctcgcttcagctttgggcacgggctgtcttataccacctttagttgcagcgtaaagagtcatactgcctcattggtacagaattccccgtcgttcacggaccgcatcatcctgaccttgcagaacaccggcagcattaccgcaagcgagacagtgttgttattcatggaagcgattgacccgaccacgacgcgtccaagagtcgaactccgcggtttcgcaaaaacgcgcctgctcgaaccgggccattcacaggacctggaatttattttaaagcctcgtgactttgcgtactgggatgaaaaagcccatctatggcgtatagactctggctcgtacaaagttcatgtagcgggttctcgcggtgttggtgattggcgcgatattgaagatgtaatcgtaaaattcgcggagggcattacgatcccatga

SEQ ID NO: 686 - DNA, 2628 bp, Artificial Sequence
  6xHis UPI00027CE685
atgcaccaccaccatcatcacgagaacctgtacttccaaggtagcatgaccgcggcggagttcgcaaaagcggatatcgacgcaattgtcgaaaaactgaccattgaagagagcacggcgcttataaccggtgtgggttggtggcataccgcggccattccgcgacttggtgtcccggcgattaaagttagcgacggacctaacggcgttcgaggccaacattttttcaacggctcaccggcgaaatgcattccatgtgcgaccgccctgggtgcgacctgggatccggaattagtacgcgaactaggagcgagaatccttgcaccggaagccaaattacgtaccgcctcggttttactggccccgaccgtaaacattcagcgctctccgctgggcggcagaagctttgagtcttttgcggaagatcccgtactgagcggcacattagcttcagcatatatcaacggcgtgcagagtgagggtgttgcatgcaccattaaacacctggtttgcaatgatcaagagaacgctcggatgggcagcaacagcattgtatctccgcgtgcgttgcgcgaagtttacctgctgccgtttcaaatcgctcagcgcgacgcaaaaccgtgggccataatgacctcctataacctggtgaatggcactcatgcctcagaaaatcgcgagctgattgagggcattcttcgcggcgaatggggcttcgatggtctggtgatgagcgactggtatggcgtgtacagcctggatcagagcattaaagcaggggtcgaccttgaaatgccgggtgtccgcaattggcgtaccccgaatttaattgagcgcggtttggtgtcacataagctgacagtggacgacttgaaagcccgggcgcgcaaagtattagaaaccgtgcaacgagcttcaaagcacatcccggaagtggttgatcgttccgtaggtgccgaggatccgccaaccgaatttgctgaagatgttgcgctcctgcgtcgggcggcggctgcatctattgtgttactgcgcaacgaagggggtgtgcttccgttagacaaaagcaaactgaagcgagtggcgattatcggaccgaacgcgaaaactcgaaccatttatgggggcggttcggcacaaatccgttctctgtatgccgtctcaccttacgaaggtatcgtgcgtgcgctgggcaatgacgtacaagtgagctatgtagagggcgtacgctcatttaagagtcttgcttcgttagattatgagctggttaatccggatggcaaacggggctggcgtatggaatattacaatcatagcgcagaacatccggaaaaggcgctggatacacctgtgcgtgtatttgacgtcacagagacctcaattcgcctgaatgaccataaacttgatttcttaaccccgcagtggagcttgaaactgcgtggcagcttaacaccgcgtgatgcggatggcgagttcgaattcggactcactgtgtctggtcgagcaaagctgtttgtcgacggccagctcgtggtggataattggaccaagcagcgcaagggcccgcactttttcggacgaggcacagaagaggagtgtggtaaaattgcagtccgtaaaggggtgcagtacgacattctggttgagtacagcaatatatcaggtccgacggaaaccgatagcagcacgggtgcggtgtttatcccgtgtgtgcgtttgagcggcgcgccagtagtggacgccgatgagcagctgcgtgcggcggaagaagcagcaaaagccgctgacgtagccattgtggtcgtcggattgaacgctgagtgggaatcggaaactttcgaccgcactactctcgccctaccagcgcgaactgacgaactggttcaccgtgttgcgaaagcaaatgcgcgcactgttgtcgtaaatcagtcgggcagcgcagttgacatgccgtgggttacggaagttccgggagtgttacaagcctggtacttaggcaactcagcaggtgacggaattgccgatgtgctattcggtgaagtgaacccgtcagcgaagatgtcactgaccttcccgcgtcgtttacaggatgttccatcatacctgcactttggtgggaaagaagggccggtccattactcggaggatttatttgttgggtacaaacactatgttgaccgcgagatagctcctctgtttccgtttggttttggcctttcgtacacctcattcgagtattcaggtctgaaactgagccagaccaccttagcagccaccaatgcggccgacctcgcgttagccgtcacgataagtattagtaacacgggctcgcgcgcaggtaccgaaatcgtacaggtttacgtaagccctccacctcacccgcttggcgaaccgctgccgagtcgggtgttacgcgggtttgccagggctgctgacctgaaaccaggcgagtcgaggaatgtgaccgttgctctggataaatatgccttcagtagttgggatgaagaacggaaagcctgggtagtgcgtaaaggcacttttggtatcagtgtagcggccagttctgtagatataaaatttacggcgacagtcgacgtctcaaaaacactgtactggaacggtgtttga

SEQ ID NO: 687 - DNA, 1386 bp, Artificial Sequence
  6xHis UPI00028E86D6
atgcatcaccatcaccatcacgaaaatctgtactttcagggtagcatgcagactaaggaattagccttcggtcgcggcgattttcccgaagattttgtgtttggcgcagccgcatccagttatcagattgaagggtgtcgtttcggtggttgcggactgtcacattgggataccttcgctgcgaccccaggaaataccgtgcgttttgaggatggtgcgacagcatgtgatcattatcaccgttgggaagaagatttggacctgatgcgcggagcgaatctggattgttatcggttctcaatttcttgggcgcgtgttctgcctgaaggtcgtggtgcgccgaatgtggcaggcctggatttctacgatcgcttagtagatgggatgctggaacgtggtctgaaaccgtttgccacgctttatcactgggatttaccagttgcattggcggatttaggaggctggcgaaaccgtgatattgcgcagtggttcgcagattatgcggaccttgctatgaaacgtctgggcgatcgcgtggcgtctgcagcaaccataaatgaaccctggtgtgtaagctggctgagccattttcatggggaacatgcaccgggcctgcgagatattcgtgctactgcccgcgccgcacatcatgttttgctggcgcatggtcgggcaaccgaagccatgcgtgctctgggtatgaaaaatctcggcctggtgaccaacttcgagtatgcggagccggcagacggcggtccccaagctcagaaagcggcacgcttatatgacggcatttacaatcgctggtttctgtcggctgtgttccaacgttcatatccgcaggatgttttagaaggcctgttaccacacatgcccgagggttttgaaaaggatttcgatgttattgccgcccccgtggattggctgggcattaattattatacacgcaaactgattacggcggatggttcgggtcgatttccgggcttcaaagatgttcctggccctctgccgaaaacacagatgggttgggaggtttatccggagggtttataccacttcattgagtggacccatcgcaactacaccaagggactgccaatttacgtaaccgaaaatggtatggcctcagcggatcgtgttagcgcgggaggcgtggaagatgcagatcgtattgcgttcctgaatcaacacctggcccaggcaaaacgcgcactcgatcaaggcgtaccactgaaagggtatatcgtctggtccctgctggataattacgagtgggcacttggttacgagaagcgttttggtctggttcacgttgattttgagacccttgagcgtaccccgaaagcgtcatggcatgcgcttgccgatgcattgcgtcgttga

SEQ ID NO: 688 - DNA, 2301 bp, Artificial Sequence
  6xHis UPI0002AD999E
atgcatcaccatcaccaccacgaaaacctttatttccagggctcaatgacattgaaagaaaagattgccttatgtgagggcaagaacttttgggagactcgtgatttcccgcaatatggcataccctctatttttatgtgtgacggtcctcatgggttgcgtaaacaagaagtgacaggacgtgaacctagcggtgtgaatgaatctcggcccgccacttgttttcctgcagcggtaagcaccgcctgctcttgggacgaagaattactgggtaaaatcggtgccgccatcgctgaagaagcgcttgatcagggagtcggcgtgttcctaggtccgggcgtgaatatcaaacgtaatcccctgtgcgggcgtaattttgaatacttctcagaagacccgtatctggccggcaaattagcggcgtcttatatcaagaatgctcagaaaaacggaattgcaacttgcgtcaagcatttcgcctgcaacaatcaagaatatcgccgctttaactctgactcggtgattgatgaacgcacccttcgtgagatttacctgacgccgtttgaaattgcggttcgtgaaggccgccccaaagctgtgatgtgcgcgtataataaaatcaacggcgtgtactgcagcgataacaaagtgctcctgaccgatatcctgcgcaatgaatggggctttgagggcgtggttatcacggactggggcgccatgaacgatcgcattgctgcatttaaagcaggctgtgatttaaacatgccggggggctcaaattacatggagcaggaagtcttagatgcggtagcacgtggtgaattaagcgaagccgaaattgatcgtagcgccgaacgtattaaaaagatggtgcgtgaagcctacgaagtactcggcaaccgaactggctgcgattataacgctcaccatgaactggcgcgtattgccgcagagcagtccgccgtgctgctgaaaaatgaggatgatatcctcccgctgaaagaatggcagaaaatagcgattgtgggcgatatggccgggaatatgcgctatcaagggagtggtagctcgcatatcaatccgactaaattagtccagcctgcggacgttctaaaatctcgcgccagcgtagaagaggcagatgtcgcggtggtttttgcaggcctcccgccggaatacgaatccgagggcttcgatagggactcaatggaaatgcctcctgagcaggttcgtctgattgaagagactgcggccaaaaatccgaacaccgttgtggtactgttctgcggagcacccgtggaaacaccgtgggcggatcgtgttaaaggtattttatacatgggactaccgggtcaggcgggcggcgaagcagttaaaaacctcctgtatggtatcgctaacccgagtggtaaactggcggaaacctggccgattcgttatagcgactgtccgagcgcggcctattatccacagcgagatggccagtatcgggaaggtatctacgttggctaccgatactatgataaggccaatgtgcgtgtgcgctggaaatttggcttcggtttaagctatacagaatttgcctacagtaacccgcagatcaatggggaaaccgtaaaaattaccgttacgaacacgggtaaacgtgccggtgcggaagttgtccagctgtacatagccccgccccatgatggcatccatcggcccgtcaaagaactgaaacgctttgcgaaggtgtttctgactccaggtgagagtcgcgaaattagctttaccttagacaatcgttgctttgctgtatgggatggcggttggaaagtgccggaagggaaatacacggttctcgtaggaggcaaccccgataaactcacagtggcaggcgttgttgaaaaagcgggcgaaaagatcaaggttccctattggcagcccggctcttggtacgaaaaaccctttggtccgccgccgttggaacagtgggaaaaaatgatcggttctaaatatgtgccttataccccgcagaagggtaactttacgatgaacgatacgctcgccgaaatgaaaaaggatagcttcatcatgcgcattctctactggtatgttaagatcagcgtcacgcgtggcatgaaacgtggtacggcagagtaccgtatgatggtcgaaagcagcgtaggaagcccgctgcgcaacctgcagatctcgggcggtatgtccggaaaaatcttccgaggtctgctcgctatcgccaacggtaaatatattaaagggctgcgtaccctcctcaagaacgatggtatgtattga

SEQ ID NO: 689 - DNA, 2376 bp, Artificial Sequence
  6xHis UPI0002AF2DE3
atgcatcatcatcatcaccacgaaaacctgtatttccagggctctatgaacggcgaaattaaatttgtaaaatttttcattatggcctttctgctgttaagcctgattctgccgtatgtcaagcaggatggcgcggcctatgctaagaaatccgataaaccgctttacctcaaccctgaagcacccattgaacagcgtgttaaagatctgctgcaacgcatgactctggaagaaaaagtaggccagatgacccagattaacgtgactcgcctcatgggtacaaacgagtgggatcgtggacctctgaatccggaatggatgaagaagatttttgtcgataaccatgttggctccatcctgtcaggtgggggtgcggccccagtccctaacaacccggaagagtgggccaagcttaccaacgatatccagaaatatgcaatggagcactcgcgcctgcatatcccgatcatctatggcgtcgatgccgtgcatggacacaacaatgtgctgggcgcgaccatctttccccacaatatcggcttggccaacgcctgggatccagaacttgtcgagaagctgtcggcgtcaaccgccaaaagcgttcgcgccacaggcattcattggaacttcgccccggttgcggatattggccgcgatatccgctggggtcgtttttatgaaacctttggcgaggacccatatcttgcgagcaaactgagcgcggcggcggtgaagggcttacagggcaagaaattgtcggaccaagagtccgtcgccgccaccgggaaacactttgtaggttacagccagccgctgaacggccaggaccgtagtcccgccgacattagcttgcggaccttacgcgaaatcttctatccgagcttccaggcacaaattgaatcgggcgttaaaaccatcatgattaacagtggttccatcaatggcatccctgtgcatgcaagtaagtacctgctgaccgacgtgctccgtaaagagatggggtttaaaggtgtggtggtaagtgactgggaagacatcatgaaactccacactgtgcataaagttgcgccgtcttacaaagatgccattcgcatgtctattaacgcaggtgtggacatgtcaatggttccgcatgatgccgacaactttacgaaaaatctgattgagcttgtgaaagaaggcaaaattagcatgaaacgcatcaaccaggcggtgtcccgtattctgacgctcaaattcgaactgggactgttcgaaaacccttatgtggatccaaagaaagcggcggagattattaatgactcggatcgtcaattagcgctgcaggcggcgcgagagacgatgaccctgctgaaaaacgagggcaacgttctgcctctgaagaaagacgtgaaaagcattctggtcacgggcccctccgcagacaatgtggcgaatcagatgggtggctggaccattggttggcagggcgccactaatccgaacgaattaccgccggcagtgactattctggagggtattaaaggcgccgtgagcaacaacaccgcagtgaaatatgtacccggcgtcccggacgagaaagatgagaaagacccgagtaaagtaaaagccgccatcgatgaagcggtaaaagcagcattgcaatccgatgtagtgattgccgttgtcggtgaaaaaccgtatgccgaaggcgaaggcaacaccgagaccgcggaacttcctgcagcccagcgccagctgattcaggccctgaacgagactggaaaggatgttattttggtgctagtagctggccgccctctaatgattaccgatctggtcgaaagtacccctgctgtgctgatggcatacctgccaggcactgaaggcggcaacgcagtggcggatgttctgtttggtaactacaacccaagcggcaaacttgcgtctacgtggccgaaatcgatcggtcaggtgccaattttctataaccataaacctggcactaagtacgagccgctctttccgtttggttacgggctgtcttacaccacgtatgaatataagaatctgcaggtgacaaatattatttcgaaaaaaggtgaagcgaaggttagcgtggatgtgaccaataccggtaaggtggcaggagacgaaatcgtgcagctgtatgttaaccaggaatatagatcagtgttaaccccggtgaaacagctcgcgggctttaaacgcattcatcttaatccgggcgagaccaaaacggtgacgtttaacttacctgcgagccagctagcgatcattcccggggacattattggtacggaacgtccagttgttgaaagcggaacgtataaagttatggttggtaatctgacaaaaacgttcaaaatcgagtga

SEQ ID NO: 690 - DNA, 1290 bp, Artificial Sequence
  6xHis UPI000327C3CC
atgcaccaccatcaccaccacgagaacctctatttccagggtagcatgaccgaaacccgtgtccctgattttccggatggattcttatggggttcatcgacggccgcgcatcaagttgaaggcggaaacactaataatgactggtgggcatgggaacataaaccaggctcaccggtccaagaacccagcggcgatggtatcgatcatctgcatcgttacgatgcggattacgcactattggcctccctgggtcaaaatgcgcacagatttagcttcgaatggagccgcatcgaaccggcagaaggagaatttagtcaagccgcgctggaccactacaaacgtgtccttgaaagccagcatcgtcatggccttaccccgttcgcgacccttttccatttcacctcacctcgttggtttgcggatcgcggaggctggctggcaccgggcgccttagatctgttcggccgttatgctgaacgcgttgcccgcgctttaggtgatctggtgccatacatgggcacggtgaatgaaccacaagtggtggcattaatgggctacttggcaggcggcttcccgcctggtaagcaggatctcgaattggcgcgtgaagcaaatcgtacctttgcagcagcgcaccgtactgcggtggccgccgttcgctctgcgagctcgtctacccgcgtgggaacgtgcctccagattccctatattgaaccattgcgccccgatgatgaagccgatcgtgcggctgcggcgcgtatgaaaggtttctttggcgatacacaccttgatgatctgcgtacagcaggagatgcgggcgatttcgtgggcttacagtattacggtcgtgatttgattgacgccacctcgccgtctttcaaagccccaccgccggaaggagccgaagtctccagcatgggttgggaggtgcatcctgatggttttgcccgtgtactccgtgaagttgcccaagtgggtttaccgattattgtgactgaaaacggaattgcgacagaagacgactcacaacgtgtgcgctatttagccggtcatttgcgtgcgcttgcgagcgttgttgcagatggcgtagatgtgcgcggttatttccattggtcttcattcgataactatgaatggggcagctacggcccacgctttgggcttattggaatagaccgccaagatggtttcagaagagtggtacgcccgtcagcggtacattatggcgatgtagctagaacgggctcattagcacgtctggcagcggcatcactgccattaagcacctga

SEQ ID NO: 691 - DNA, 2241 bp, Artificial Sequence
  6xHis UPI000059ACE1
atgcatcaccaccaccatcacgaaaacctctacttccagggctctatgaaacgcgtactcatgactccggtagaccgtgacgctggcattgaattttctaacccggtactgcagagcagcctttcaagccctatggcggccctcgccgacccggacgagcgtgcgcgtgaagttgaagcgcgcatgaccgatgatgagcgtttctcgatgctttatagcctgatggtgcgcattttcggcaccaacgctcgtgaatcgcgtgtaccggcgcatgttcctgatattgctgggtatgttcacggagttcctaggttgggcatccctccgctgctgttagcggatacctcactgggtgttcgcgcaacacatgatgtaaatgaaaccgctaccgcccttcctgcgggtttagcgttgggcgcaacgttcgatccgatgttagccactgccgcgggtaccctgattgggaaagaaatgcgtgaacgcggcttcaatgtcgccctgggttgcggcatcaatttagtgcgcgaagtgcgtaacggtcgcaattttgaatatctcagtgaagatccacttttatcaggcaaactaggggcaggcatggtttcaggcacgcaagcggaaggcgtgattgcattagtaaaacatgtgtctttgaacgcctcggagactaacaaattcttcctcgatgcaattattgatccggcggcccaccgcgaaagtgatctgttagcattccagatcgccattgaaacggggcgtccgggagcgttaatgggggcatacaatctcgttaacggggaatacgcgtgcggtaacaaacagattattcaggataccattaaagacgctatgggtttcgaggggtgggtaatgagcgattggcgcgcagtaaactcatgggattacagcttaaaaggcctggatcaacatagtggcgcccagctggatgaatgcgaatggttcaacgaaccactgcgccgcgcattcgacgaaggccgaattccgcgcacacgtatcggcgaaatggtacaacgtatgctccgcagctattttgctgttggaattgatcgtccaagtgcggctgaacccgtggacgccgcagctcacaatgatgtggcgttagagatagcccgcaaaggtattgtgctgttgcagaatcgcgacgcaatgttgccactggcaccgactgtgcgtcgtatcgctctgatcggtggcttcgcccaagttggcgtactgagtgggtcaggctccagccaggttcgccctcggggtggttacgccgcagaaattccttttcgcagtcatccgcttttaggcgcgacctcaatgtgtttttttggaccgagcccactggcgcagttacgcgcccgcctacccggtgcaacgattgattttgattcgggcgcacatattgcggatgcggtggccctggcagaaaaagccgaggtagttattgtgaacgcaattcgtcacgaaggcgaacgctttgattgcccggatatgaccctgccgtatggtcaagatgccctgatcgaagcggtagcccgtgtcaatccaaacgttgtggtcgtgctgcaaaccggtaatccgattgcaatgccgtggcgagataaagtgcgttctgtggtgccggcgtggttcccgggtcaagccggtgcacaggcaatcgcggaagtgctcaccggcgaagttaacccgagcggccgccttccggtgacgtttccggtaagtgtcgaccaaacccctcatccgcgtctgccgggtgccgacgtagagcttggaacacctattcaggtccgctatcatgaaggcgccgaagtgggttacaggtggtttgcccaacaaggcgatatgccgatgtttgcgttcggtcacggcatgtcctacaccgattttgcgtattccgacttcagtgtatccggcggcgacactgtaacagcatccttcaccgttactaacacgggcccacgcgatggtgacgatgtacctcaactgtatttgacccacgccgccgaagcaacccgtatgcgattattagggttcgaacatgtctggctgagtgctggaggcagcgtacgtgtgaatatggtggcggatccacgtctgttaggttgtttcgacgcaaccagtggtcgctggcgcatcgccgaaggtgattatcgcatagtgttagcgcgctcagcagcccatcacgtggttgatgcgacggtacgcctggaacatcgcgaatttggtcgctga

SEQ ID NO: 692 - DNA, 2616 bp, Artificial Sequence
  6xHis UPI0000676B8D
atgcaccatcaccatcaccacgaaaacctctattttcagggttccatgcttacctcgccgaccgcacgaaccagcgtccgtataagccgcccggcgactaccgagcgccctaataccgtgctgacctccggtagcctcgatattgcgatggtacaggttgtgagccgtaccctgacccctccgactagcaacatgaaactgagtgccgcactatccacccttgcagcgttgcaaccggcagtgggtgccgcagttcagaaccgcgcttcagacgttgccgatcttgaacattactggtcatacggccattccgaacccgtctacccgacccctgaaacgaaaggtttgggtgactgggaagaagcctttacaaaagcccgtagcctggtggcacagatgaccgacaaagaaaaaaataacatcacgtatggttattctagtacagcgaacggctgcggagggacctcgggtggtgtaccacgtctgggatttcctggcatctgccttcaggatgctggcaatggtgtgcgcgggaccgatatggtgaattcgtatgcgtcaggcgtgcacgtaggggcgtcatggaatcgtgatctaacatattcgcgagcccaatatatgggagcggaatttaaacgtaaaggtgttaatgtggccttgggaccggttgccggccccattggacgtattgcgcgtggtggccgcaattgggaaggctttagcaacgatccgtatttatccggtgcactgaccggtgataccgtacgtggtctgcaagagtctgttatcgcatgtgtcaaacatctgattggcaatgaacaagaaactcaccgttctaccccaagcatgttggcaaattctagaaatcagtccagctcaagcaatctggatgataagaccatgcacgagctgtacctgtggccgttccaggacgctgtgaaagcgggtgccggctcggtgatgtgttcgtacaatcggatcaacaatagttatggctgtcaaaattctaaagccatgaacggcctgctgaagggcgaactgggtttccagggctttgtagtgtcagactggggggcgcaacacacgggcattgcgagcgcagccgccggattggatatggcgatgccttctagtagctattgggaaaatggcaccttggcacttgcggttaagaatgaaagtctgccgtccacacgtctagatgacatggcgacgcgtattgtggcgacctggtataaatatgccgaaattgagaatcccggtcatggcttgccgtattctttactggcgcctcataacttaactgatgcgcgcgatccgaagagcaaaagcacgatcctgcagggcgcggtggaaggccatgttctcgtaaaaaacacgaataatgcgctcccgttaaaaaaaccgcaattcctcagcttatttggttatgatgcggtagctgccgcacgcaacactatggatgatctggactggaacatgtggtcaatgggatacgataactcgttaacgtatccgaatggttcagcggtggacgcgatgatgctcaaatacatttttcttagttcggccaacccaagcgccttcggcccgggtgttgctttaaatgctaccaccattaccggcggtggttccggcgcatctacggcatcatacatcgatgcaccgttcaacgcttttcagcgccaagcatacgatgatgataccttcttagcgtgggactttgcgtcacaaaacccgttagtaaacccagcctccgacgcgtgtattgtgtttatcaatgagcagtcgagcgaagggtgggatcgtccgtacttggcggacccctactcagatacactggttcaaaacgtggcgtcacagtgctcaaatacgatggttgttatccacaatgccggcgtccgtttagtagatcgctggatcgagaacgacaatataacagccgttatttatgcacatctgccgggccaagacagcgggcgtgctctggtggaagtgatgtacggcaaacaaagtccgagtgggcgcctgccgtatacagtggccaaaaatgagtccgattatggtagcttattaaacccggtgattcaatcgggcaccgacgacatatattatcctcaggataactttaccgagggcgtgtatatcgattacaaagcattcgtggccgccaacattacgccccgttatgagtttggctatggtctgacctactcaacctttgattatagcgacttaaaagtctcaaccagctcgaatgttagcacctcttatctggccccggggactacggtggcagaaggaggtctgccgagcgtgtgggatattattgcgactgtgacttgcactgtctccaacacagggagcgtagctgcggctgaagtagcgcaactgtacatcggcattccggggggacccgccaaggtcttacgtggcttcgagaaacagctcatcgaaccagggcaacaggtgcaagtgacgtttgacctgacccgtcgggatctgagcacctgggataccgaaaaacagaattggggcctccaggcgggctcgtacgccctgtatgtgggcaaatctgtgctggacattcagctgacgggtagcctgtctctgtga

SEQ ID NO: 693 - DNA, 2427 bp, Artificial Sequence
  6xHis UPI00004269B5
atgcaccatcatcatcatcatgagaacctgtatttccaaggctcaatgaatctgaataagaccggtttttttacagcgtttacatttctgagcgcaccagtttgggcgcctccgcaactgaaagaagcggaaagtatcccgagtgttattgcagcaatgaccctcgaagaaaaggcggccttcgtatctggcacggggatgaacaacgcggaaaaagtagcgggcgccgccggtagcaccttggccattccgcgactgggcattcctcaaattgtgtttgcagatggaccggttggtgttcgcttaggcgcaggcccgacggggggagagaaaagatttgcgacaggctttccggtgtcagtagcgatggccgctacctgggatcctgcaatcattaagcgtgttggcggcgctatcggtgatgaggctaaacgttatggggtagacttgattctgggtccggcgattaatatccaacgccatcccctcaacggacgtaacttcgaatatttcaccgaagacccgttattgaatgccattatgacggcgagttacattgacggtatgcagaccgaaggcgtaggcgcggttctgaaacattttgcggccaataatcaggagacacgtcgccagatcgttaatgaaattatcagtgatcgtgccctgcatgagatttactttccaggatttgaatacgcgatggagaaagcacagccgtgggcagttatgtctagttatccaagcattaacggcaccccaagcagtcagaatccgtggcttctcaaagatgtgcttcgtcaacagtggaagtttgatggctttgtaatgagcgattggtatggtgtggctgacccggttagcgcactgaaagggggaaacgacctgaatatgccgggaggccgcaccccggacgattcattgtttcttacgccgaataccgacccgaaagacgttgtgctggcagcgcttaaaagcggcgagctgacccaggaccagatcgatgagaacatacgaaatatcctgaatgtggtgattaaaacgcataggttcaaaaatggagacgcagctgtgatgcccgagccagttgatcactccgcgctggcgcgtcagattgcggcggacagcatggtgctattaaagaatgatgcccaaaccctcccgatgaaagcgacctttcgcgtggcagcctttggccagaatattgataactttttcgtaactggtggtggttccgctgaggtgaacattgatccgaaaaggctcgtgacccttccacagggtctgaaaaacgcgggcatcgcactaattcgtcaaattggcgatcagaccttagatgaacccgtcaaccagccggtaatcacaaaagccgcacaacagtccgatattgcgctgatttctattggtcgtagcagcactgagggtgctgatcgctattcgatggcaatgcatactgcggaagtagcaatgattcagaaagtggcgagcgccttccatcaacagaacaaaaaagttgttgtccttttaaatattggcagcccgatcgagatggcctcgtgggaacagtatgctgatgcaatactactgacctggcagccgggcgaacaagcaggtaatgcggtggcagatatccttctggggaaagttaatccgagcggcaagctgccgctcactttcccgaaacgcttagaagacagccccagctttggcaattatcctggcaacgcaaagacggttatttacggagaaggcatctacgtgagctaccgttatttcgatacaaaacgtattgcgccgatgtaccctttcggctatggtttatcctatagtactgtgaattacggtaagatcagcccggagaaaccagtgttcaacatcgacaccgagaatagcatcgaagtgagtataccggttcggaacacgagcggtattgataccaaagaagtggtccagctgtatgtacacgataacgcatcgaggctggatcgccctgaacaggaactaaaagcatttgagaaagtaagcctctcagctggcgaggaaaaacgtgtcgcctttaaactggataaacgtgccttcagctactacgatgaagataagaataattgggtactggagccgggcctttttaccctgcgtatcggccgtagttctcgcgatattcacgccgagacaccgttaattgttaaatcatcgacccctgcgttttccttcgataccccgtggatcgatatccagacgtatgagaaagctgccaccatcgtggctcgtttcattggtgacgaacagacaaatgcgtggatatatggcaaccctaccttgggtgataagttagaggacgccctcaaactgaaacccgaattcgcgaaggacgaagccaaacgccagaaattgaaacaagaaattttgcaagagattaacagcctgtga

SEQ ID NO: 694 - DNA, 2574 bp, Artificial Sequence
  6xHis UPI000331CC98
atgcaccaccaccatcaccatgaaaatctttacttccaaggatcgatgacgttaccggagctgaacgttgaagaattgctgcaacagctgacggtgaaagaaaagatcgaactactggcgggcaaggatatgtggcatactgttaacaatacccgtctgggtatcccttctattcgcacctctgacgggcccaatggtgtccgcggcatcaacttttttgaaggcaccccgtcgagttgtttccctggagccacggccctgggcgcgagctttgacaaccagctgcttgaaagggtgggctcagcgctggccgatgaatgtattgccaaaggagtgcatgtgttgctggcgccgaccattaatattcagcgcagtcctctgggtggtcgcgggtttgaatcgtactcagaagatcccgaactcagtggtaccctggccaaatactttgtgaaaggcctgcaggataaaggtgtggccgccactattaaacactacgtaggcaacgatcaggaatttgaacgtatgtctatgagcagcgagatcagcgagcgtgctttgcgggaaatttaccttcgggcgtttgaaattcctctccgagagtctgaacataagccgtggtctgtgatgacggcgtacaaccgtgtcaacggtttacattgcagtgaagatcctcgtctgctgggcgacattctgcgtggcgaatggggctggaacggaatgacaatgtcggactggttcggcacctatagcgccggagaatccacccacgcaggtcttgacctggagatgccgggccctagtgtggtgcgcggtgcagctttacagcgtgcgttaaccgctaaaaaggtcttcattgaagatatcgacgctcgtgtgaaaaacgtccttgaactgattaataaagtgcgtaagtctggcatagatgaggcgacgccagaaaaagttcatgataccccggaattacgtcaaacccttcgtgaagccgcggccaacggcgtagttctgctgaaaaatgaagaaaatgtgatgccgattaaaaaaggcaccacaaagatcagtgtgatcggtccgaacgccgaaagcgccattatatctggcggcggcagcgcagcacttcgtgcgagttacgctgtgagccccctggatgcgattcgcgaacaagccaaagaaattggcgcagaggtagtgtacagtcgtgggggcaacgcgcataaattaaccccgttatttggtccagaacttaaaactgcggatggccgtgcgggggtggacgtgaaattttatgggagtgatccggccgctggcaaagcaaaacctctgcacgaactgtatgcgcattcgtcccacctgttctttaatgataacctgccgggaccggaaaccgttccccttacttgttgggccgaagcgagtgggatttttaccccgaataagaccgataactacgaaattggtattgcgggtgcgggccagaccgatctgtttgtggatggtgaacgcgtagtggataatagcaccaacccgcaaccgggtacattatggttcaattcaggctcgcaggaacgcaccgtggtaaaaaaactggaagaaggcaaacagtatagcattatggccagattgtattattcctctgaaggtgctcaggccgcgggcactctgtcaccacatagtcgcggcggtatacgcttcggcattagtccgtctaagagccaggatgaatttctccaagaagctctcgatgcgtgtaaaggtgctgatctggtgctttgttttgttggtctgaataacgacttcgaaagcgaaggatttgatcgccctgatatgaagctgccggatagcgccaatgccttcatgaacgctattagttcggcgcactctaatacagttgccattgtccaaagcggcactccagtagaattaccgtgggttgataaagttaaaggcgtgtatcaggccttctatggtgggaacgaagttggtaacggcctcgcagatattctttttggtcgcttaaacccgagtgccaaactgccgctgactatgcctgtggaactgcgagattcgccgtcgcatcttaattttggcggtgagaacggtcgtgtggtgtatgccgagggagtgttcgttggctaccgtcattttgccactaccggcaaaaaaccgctgtttccgtttgggaagggcttatcctacacgtccttcgatgtcaccaacgcacgtgtagaccaaacaagtgatagccatgatgtcctgattcgtatgaaagttaccaataccggcagtgttgcaggccgcgaaattatccagctgtatgtcaacgatgtagagtctcgcctagcccgtccgtttctggaactgaaagcatacgcgaagaccaacttgattcttccgggtgagtctgaggaggtgaccctgatgctggggaagcgtgcatttagctattttgacgactttaagtcgcgctgggtgatcgaagcaggggaatttaaactcttcgtagcgacgagcagcgcggttgaggatatcaaacacacactgtcatattatgtcgacaaaacgagcgaattcatttga

SEQ ID NO: 695 - DNA, 2607 bp, Artificial Sequence
  6xHis UPI0003522404
atgcaccaccaccatcaccatgaaaacctgtactttcaaggctcaatgagcgccgcaaccagcgatacgaataataacgttgacattgatgcgctgttggataaattgacgctcgatgaacaaattagcctgcttgccggggcgagcacttgggaaactgcagccattgatcgcttagacgtaccgtcactgaaagtgactgacgggcctaatggtgcgcgcggcgaaacctttttagatggtaccactgcggcctgctttccgagttgcgtttcgctggctgcaaccttcaaccgtacgctgtcacgacgtgtcggcaaagcccttggtcaggaatctcagaccaaaggagcatacgtcctactcggcccgaccgtatgttcacaccgttctccgctgggtgggcgtaacttcgaagcattcagcgaagatcctctgctgtctggactgttagccgcggaatatgtgaaaggcctgcagtccgagcgtgtaggggctaccgtaaaacattacctcgctaacgagcaagatacccgccgtttcagcattaacgaaaccatcagcgaacgtgctctgcgtgaaatgtatttgcgcccgtttgaaattgttgtgaaaagcagcgctccgtggtgtgtcatgaccagttacccgaaagtgaacggtattcacgtcgattcatcgaaaatgtttattcaggacattcttcgcgatcagtggaaatttgatggtctagtaatgtcagattggggagcaacgacctcaaccaaagactcaattaacgcgggcttagatctggagatgccgggtccggccaagtggcgttcattagacgcagttaaagcggcagttgatgcaggctccgtgacatcaaaaacgatagccggtcgcgcccgtgcagttcttcaactgctgcatcgtacaggtaagtttagtgatcgaaaggaagccgtcagcgagacggcgattgacaaaccggaacaccgcagcttaatccgcgaagccggtgctgagggcctcgttcttctgaaaaacaccgatagtattctcccgttggatatgcgtaattgcaaaaaactggctattcttggccctttggcgaaatatgccgccgcccacggtggcggctctgcgagcttgaactgccactataaagttaccccttttgacgcgtttaccgcccgcctgggcgccgagaccgaaatcctacacagtaaaggcgcgcatatttatcgtgtgtacccagaactggaagcagggtgtactaataaagaaggtaaacccggatttaccacggaatatttcgcaaatgaagaattggaaggcaagcccttttactcgcaagggtttccacgcggctactttatgacaatgatggacgataaagcctcggggaaaaaaagtgtgcgtctgacgacgtcctttgtgccggatacctcaggcaaccattatctgagctacagcagcatgggtaccagcaagatgtatatcaatgacacggtgattagcgagcagaaacaaagcaccaaagatagtatggcctttttgcttggaactcaagaagaaaatcgcttccgttatagtttcacgaaagggcaggtctataagattcatgtggacgcatgggttccggcagagctgaacggcgaactgtatctgttcgacggccatattgccgtccacctcgggttcgtttcacaggaggagatggaacgtgatgtgcttaccgaggcggtggatctggctaaaaaagcggattatgcaatcctattcgtgggcaataccacccagtgggaaaccgaaggtcaggatatggaagacatgaacttgcctgcagatggcagccaagatcgtctgattacagaagtcgccaaggttaattccaatactatcgtagttaacaccaccggcgtcgccgtcagtgtgccgtggctggatgaagtaagcgcacttgtgcaggcgtggtatagcggccaggaaaccggcaacgcgattcttgatgtcctgttcggtaaggtgaacccgtccggtaaactgcccatctcgtggccgcgtaaatacgaagatacagccgtatgcggtaattttggtctggattcgtatgaatcacgtgaggtcgaatacgtggagggcgtgtacgtcggttatcgccattttgacaagcattttgcgacagaacgccaggttcttttcccttttggttacggcctgtcctatagtacgtttagcatcctggaggtatcactggagggtcgtattagcaacgataccagcgacggtgttaccatttctgttaatgtggaaaatacgggtaatctggccggcgcggagacaattcaggcgtacctggccccgccgacgattaatacaattgatcgtccgctgaaaggtctcgtaggcttcagcaaggtatttcttagcaagggtgagaaaaaaagcacgactattagctttcagaaagatagcgcggcgttctgggatgtggtcaagcataaatgggtaatcgaacgcggaacctacaaaattctggttggcacaagcagtgatccgaaagatttaaagacctcactcaaggttgacgtcccccaaactttctcgtatgaaccgtga

SEQ ID NO: 696 - DNA, 2598 bp, Artificial Sequence
  6xHis UPI0003BF753A
atgcatcatcatcatcaccacgaaaacttatatttccagggctccatgactaaaagcaacgttgacgaaaccctgagtaaattaactatgccggataaaattcgcctcctatgtggtctgggttggtggcacacggaacctgtaccttcgctgggcataccgagcatgcgtatgtccgatggtcctaatggggtccgtggcacgcagtttttcaatggcgtaccgagtagctgttttccgtctagcaccggccttggttccacgttcgatattgacttagcccgtcaagtaggcgaggcgttagcggatgagtgccgcgcgaagggctgccacatcctgctggggccgacgactaatacacagcgctccccactgggtggacgttcttttgaatctttcagcgaggaccctgtgttgaacggctcgattgccgcagcttatattaacggcctccaaagcaaaggagtggcggccacactgaaacactatgttgcgaatgatcaagaatttgaacgcttttcggtaagttcagaagtgtctgaacgcgccctgcgcgaaatttacctaaaaccattccaaattgcgattcgcgagagtaacccctgggcactgatgtcaagctataaccgtgttaatggcttgcatgtgtcagaaaacaaatggctgctggatgatatcctgcgcaaagaatggggatacaaaggcatgattatgagcgactggatcggcgtctattcaaccgcagagagcattcgtgcgggcctggatctggagatgcccggcccgaccgtgatgcgtgggaatgccgttatgcgagcactagcagcccagaaattattcccgtccgatatcgacgaccgcgtgcgtaaaatcctggaactgctggagaaagctttcgcgagcggtattccattcggcgccccggaaaaacccgtggacacccctgaattgcgccaattgctgcgtaccacggccgcagatagcgttgtgctgctgaaaaacacgaagaacctgctgcctctgaccagctcaagcaatatcaaaaagattgcggtaattggaccgaacgccaaaaccgcgtttacgagcggcggcggttcggcccgtctcttggaaagctggaaagttaccctgctccagggtattacagccgccgcaaaagagatcgacgccgatgtgcaatacaccattggggccaccagccataaaatgttacctctggccgaagattacgtgttccagcatgggggccaaccgggcggagtgctggaattttggaacgaaaagccgagcgaagattttctgtctaccaaagcggacatcggtaatctaaatgagggtgtggtttggtcaactaccaccaaaagcacaaattgtattttactggacggagttaacgcgaataaagttgattacaactgctactttcgctacaccaccacatttatccccgatgaatcaggcgattggatatttggcgtgtcggtatccggtcttggcaacgtgtttattgatggcaaattggcaattgatctgagcaacgacccaccgaaaggtaaccatctcatcggagttggtaccgcggaactgtgtgggattgtgaaagatatgcagaaaggccagaaatactcgctggaaattcgcatcagcaatctggagtttatggcgcagatccctatcattccggcctggggtggatttcgcctgggcgcaatgaaggttatggaaccggagcaggccattaaagacgccgtgaagctggcgaaagaatcagatgtagccattcttgttgtaggcctcaatcacgaatgggaaagtgaaaactacgaccgtgaggacctgagtcttcctggtctgaccaaccgcttggttacggaagtcttggcggcgaacccccagactgtggttgtaaaccagtcaggcagcgcggtggagttaccgtgggcggatgaagcgagcaccgtccttcaggcctttttcggcggcaacgaattaggaaatggcgttgcggacgtgctgtttggcaaagtgaatccgtcggcgaaactgtccctgactttcccgaagcgcctggccgactgtccggcgtatccgtcctacggaaacaaaacgcaagatcacggtaaggtgctgtacaacgaaggggtgttcgtgggctaccgcggttatcaaattaagtctattgccccggcgtttcctttcggattcggactctcgtatacccagttcgaatattcagacttacagtcaaccccaatctccagtgacggcagcttcaccgtaaccctgaaggtcaaaaatgtaggtcagataaatggtcgtgaggtggtgcaaatttacattagcgacccggaatcaagcctggcgcgtgctaaacaggaacttaggggtttcaaaaaagtgtccctaaaagccggtgaaactaaagaggtgaaagtagagttagatcgcgatgcactgggcttctatgacgaacgtcgtggctcttgggtggcagaacgtggtaaattcggcgtactcgcgggtgctagtagcgaagacattcgtctgcgcactgaggtagagcttaaagatacactgacctggaccggcctgtga

SEQ ID NO: 697 - DNA, 2736 bp, Artificial Sequence
  6xHis UPI0003DBCB4F
atgcaccaccatcaccatcatgaaaacctctatttccagggaagcatgtctgaacagtttaaagcgcatctggttcgtaaaattacggataaactgatgaaaaaacttagctttattgtcgtgctcttaggtgtgttttgcttgaatgggcaaaacaaattcccttatcaggacgcgagtttaccggtggaagaacgtgtccaagatctcttgaaacgtatgtcgctggaagaaaaagtacgccaaatggatatgtaccgtggtgaaaatttcaaaacggacgagaaattcgacaagaagaagacagtcggccacattaacgatcttggtgtgggagcaattcacgatatttacccgcgcagcgcgaaaatgattaatgatctgcaaaaacatgtgatcaaaaataatcgctggggaatcccggcgttgatcatgtgtgaaatgctgcacggctacgtcgatgacggggcaacggcgttcccaatgaatatcggtttaggtgcgacctgggatacggaacttatgtacgaagtgggacgcgtgattggtacggaagcgaggattcgtggtgtgcattacggattaggtccggtcttaggtattggccgagagccgcgctggggccgtgtggcggaaacctttggcgaagatacctatcaggctagcgaaatgggcctggccatgattaaagggatacagggtgacacccttgccagcagcacctcaattatagcggaaccgaaacattttgccgtacactcatatccgcaagccggcggcaactcgagcccgatcatcgtgggtgagcgaaccgcccgagaagatttcctgccggtcttcgaaaaagcctttgttgaaggaggtgcactgggcaccatgtgcgcctatacagaactggatggtattccatgcgcagcgaacgagtggctcctgaccgatgtgttgcgtaatgagtggggctttaagggcatcgtcatttctgacctgggtgccattaaatatgtgcaaacgacccactatgtagcagatagccccaaagacgccatcaaacaaagcgtggccgctggtgtcgacatgcagttttatgacttcagcaatgaattctggcagaaaactctagtggaacttgtgaatgaaggcgatctgtcaatggatgcaattgaccgggccgcgggcggcgtcttgcgtttaaagtttctgctgggtctgttcgaggatccttacaccgatgccaagctgtttgacaaactgtaccatacagagaaacaccagaacatagcgctgcaggcggcacaaaaaagcgttaccctgttgaagaacgatggtaacctgcttccgttcaacgatgatgtgaaatcgatcgcagtgatcggcccgaatgcggatgagacccgtttgggcggctatgctgttcgtaacaaagaagcaatcaccgtactggagggaattaaagagaaagttggtgataaagtgaacgtcttctatgaagagggagttcctctgattataaaaggtcagatcatcagcagcgagaacctctggacgcctgacgagagcagtaacgggttgaaaggggaatactttgataaccgttcactgaagggcgaaccagtcctaactcgtgttgatgatgagttagaattcgactggccttggtccccgggtgaaggtgtaccggatgaccagttctctattcgttggaccgggtttttaaaaccgaccacgagttttgaaggctggctgggcctttcgagcgacgatggcgttcgtatgtgggtggatgataaattgattgtagacaattggaccaaaggctcgaccaatattgtcacctatccgatgaactttgaagccggtcgtaaatacaaagtacgtattgagatgtgggaaggtggttggggggctcgtgcccacctgcgttggaacctaaaaaaagttgattttaatccagcagtcgcgatcgctgaaaaggcagacgtggcggtcgtggtcattggcgaatctcgtgaactggttgaggaaaatcgcgatgtggcgactttggatttacacggcaagcagctggagcttatacaagcaatccagaaaaccggcaccccggttgtttgtgtgctccttaacggtcgcccactttcggtcaactggattgataagaatgtgccttccgtgcttgaagcttggttcccgggggaaaagggaggtcaggcaattgcagatgtgttatttggagactataacccggctggtcgtctatcgatcacagtgccgaagtccgtgggccagctgcctatttactacaatcagaaaccgtccgccattcaccgctatgtcgaagaaagcgaagatcctttatatcacttcgggtacggtctgagctacaccacatttaattacgataacctgaagctgagcgcagaaacgattggcaaggacgaatcagtggaagtttccgttaacgtgagcaataccggtgattatgatggcgaggaagtggttcagttgtacataaatgatgtttattcgagcgtcaccacgccccgtaaagccctcaaaggatttaaacgcgtgttcattaaaaaaggcgaaacgaaagaagttattttcgaattaaccccagaagagttggcaatttggaatcgcgatatgaagcgcgttgtggaaccgggtaaattccaagtcatggtggggggcaatagcatggacactatcaaaactagcttcgaagtgaccaattga

SEQ ID NO: 698 - DNA, 1974 bp, Artificial Sequence
  6xHis UPI0003F362FF
atgcatcaccatcatcaccacgaaaacctctactttcagggatccatgaccgcgtataataaagtgaacggcgtgcatgttagtgagagcaaaaccctcctgcagaaaatcctgcgcgaagagtggaagtttgacgggctggttatgagcgactggtttggcacctacagtacaacgggatctgtgcacgcgggcttagatctagaaatgccgggcccaacgttatggcgtggccctgcactgtctcacgcgattatggcgaacaaagtgaccgaagagcagctggacaacagagttcggaatgtgctgaacctgatcaattatagccgcgcgtccggtgtgcccgaaaacgccccggaaaaacgccttaaccgccctcaggaccaagctcttttgcgcagggctgcaagcgaaagcatcgtgctgctgaaaaacaatgataatgtcctaccgtttgtaaaatcaaagacaacggcagttatcggcccgaacgctaaaattacacggttctgtggcggcggctcggcttccctattaccttattattcagtgtctccgtatgacgggattgcaaaacagtgcggtaaggtgggcttttcacaaggagcaatggatcatcagatgctcccgcagatgggggacgtgttgcgaaccgataaaggtcagcgagggtttacctggcgtgcctataacgagccagcgaccattaaagatcgcgtgccgctggatgaacgagtgttaaccgactcaaattatttcttcctggattatgagcacctagatctggcgccggtttggtatagccaggcggaaggtatctttaccccagaagaatctggcttatacgatttcggattaggtgttgaaggcactggccgtctgtttattaacgatgcgctgttaatttcgaatattgagaaccagaagccgggcgaaaccctttttggtagcggtaccgtggaagaaaaaggcagtatggaacctgtcgcgggccaggattataaagtccgtgtcgagtggggctgctttaaaacccgtcgtcttcctccgtctggtcccgttggtggacgtcatggaggtcttcgcttcggcgcctgtcgtcgcattgatccggcgcaggcgattgaagaagccgcccaagttgccaaaagcgtggatcaggtagttttagtagtcggactgaacggggaacttgaatcgaagggcacggatcgtactacgatggatatgagtgcccataccaacgccctggttagcaaagtcttagccgccaatgtaaataccgctgttgtcgtccagagtggtaccccggtgggtatgccctggattgacgacgcgaaagccgtttgccacgtatggtatggtggcaatgagacgggcaatgcgatcgctgatgtcttgtttggcgatgtcaacccggcctgtaaacttcctctgacaatcccccggcgccttcaggataacccgacttattttaattttcgctcagaagcgggccgtgtgctgtacggcgaggatgtgtacgtgggctaccgctattacgaaaaaattgattgtaagccgctctatccgtttggtcacggcctgtcttatacggcgttctcgctgcagaatctgaatgtccaggttgatgatgcatgccgtgtaacgctggaaatgacaaacacaggctctagggctggcgcgcaagtggtacaggtttatgtagcaccgccgacgactatggccgttgcgcgaccggtgaaggagttaaaaacgtttcgcaaagtatatctggaggctggagagaagcgccaaattaccatcgacatggataccgtgctgtcaacaagctactggcacgagggtcgtgataagtggtgctccgaacgcggcgaatatcgcgtactggtgggtacatcgagcgcggataccccgttagaagcgacctttgcagtggataaaacgcgctattggaccggcctggccccgtga

SEQ ID NO: 699 - DNA, 1398 bp, Artificial Sequence
  6xHis UPI00006EA168
atgcaccaccatcaccatcacgaaaatctgtattttcagggcagcatgaacaagattgaaaacagctttctgaataaaaaccagttcggtgaagatttcctgtggggcgtgtctacggcggcgttccaaattgagggtgcacatgatagcgatggaaaaggcagctcgatctgggatgtgtttacgtcgcagaaagggaaaataaaaaacgggcatcacgcgctgacggcgtgtgatttctataattcctatcagaacgacattgacttgattcgggaactgaacatcccgaacttccgctttagcatctcatggccgcgcattatgccgaccggagttcatccggtgaatcaggccggaatcgattactacaataaaattatcgacagcctgctggcgagcggtattgaaccgtggattaccctgtaccattgggatctgccacatgcgttagaagtaaaaggcggctggacgaaccgtgaaagcgtgaattggttctcagaatatgttgaagtgtgtgcccagtactttggcgatcgcgtgaaaaactggatggttattaacgaaccctcagtgttcaccggtgcaggctactttctgggtattcacgcaccgggcaaaaaaggtattaccaattacctgaaagccatgcatcatgtgacgttggcgactgctgcgggagcccgtatcctgcgcaataaagttcctgaagcaaacatcggcaccacctttagctgcacccacatcgaggccgccactgaatcggcgaaggacgttgaagcagccaaacgtgtggataccctgctgaaccgcactttcatcgaaccgatactgggcctgggttacccgcagaaggatcttccggtcctcaaaaaactgaataactacattctggaagatgacctgaacaacctggattttgattttgatttcattggcctgcagtgctatacgcgcgaagtggttaaatcatctattctcaccccgtatattggcgccgagcttgtcagcgcagagaaacgcaacgttatatctacggaaatggggtgggaggtctatccgccggcgctataccacgtcttggagaaatttaacaagtacgacaaaattaaaaagatcattatcacagaaaacggagcggccttcccggatacggtaaccaacggcaaggtcttcgatatcaaacgcacccactatattcaagatcatctcgaacaaattctcaaagcgaagaagaacgggctgaacgtcgaaggatattttgtgtggagcttaaccgacaactttgaatgggcagaggggtataatgcacgcttcggcttgatccatgttgacttcgagacgcaaaagcgcaccattaagaactcaggcctgtggttcaaagacttcctgagttga

SEQ ID NO: 700 - DNA, 1482 bp, Artificial Sequence
  6xHis UPI00002394F5
atgcatcaccaccaccaccatgaaaacctgtactttcagggtagcgccgccgtacctaaaccgaactggttaggcggcctttcacgtgccgcgttcccgaaacgcttcgtttttggtactgccacctcagcatatcaagttgaaggaatggcagcctcgggtggacgtggtccgtcgatttgggatgcgtttgcccatactccggggaatgtagcgggtaaccaaaatggcgatgttgcgaccgatcagtaccatcgatacaaagaagatgtgaatctgatgaaatccctgaactttgatgcctaccgcttcagcatttcttggagccgcatcttccctgatggcgaaggccgggtgaaccaggagggcgtcgcctattacaacaatctcattaactacctgctgcagaagggcattacgccgtatgtgaacctctatcattacgatctgcccctggcattagagaagaagtatggtggctggctgaacgcaaaaatggccgatttattcaccgaatatgcggatttttgtttcaaaaccttcggtaaccgcgttaaacattggtttacgtttaacgagccccgtattgtagcgcttctgggctacgatcagggcaccaatccgccaaaacgttgtacgaaatgtgccgctggcggtaacagtgccaccgaaccgtatattgtggcccacaattttctcctgagtcatgcagcggcggttgctcggtatcgcaccaaataccaggcagcgcagcagggcaaagtgggcattgtcctggacttcaattggtatgaagcgctgtctaacagcacggaggatcaggcagcagcgcaacgcgcccgggattttcatattgggtggtacctggacccgctgattaacggtcactacccacagataatgcaggacctggttaaagatcgcctgcccaaatttacccctgaacaggcccggttggtaaaaggctcagccgactatatcggcatcaatcaatacaccgcgtcgtacatgaaaggacagcagctgatgcaacaaactccgaccagctattccgcagattggcaggttacctacgtgtttgctaaaaacgggaaaccgatcggacctcaggcgaactcaaactggctgtacatcgttccgtgggggatgtacggttgcgtgaattatattaagcagaaatacgggaacccgactgtggtgataaccgaaaacggcatggaccaacccgccaatttatcccgtgaccagtatcttcgtgacactacgcgagttcacttttaccgatcatatctgacacagctgaaaaaggcaattgatgaaggcgcgaacgtggcgggctattttgcctggagtctgctggataattttgaatggctgtcgggttatactagtaaattcggcatcgtatatgttgactttaacacgctggagcgtcatccgaaagctagcgcgtattggtttcgcgatatgttaaagcactga

SEQ ID NO: 701 - DNA, 2193 bp, Artificial Sequence
  6xHis UPI0002B65681
atgcaccaccatcatcaccatgaaaacctgtacttccaagggagcatggataagaacgaattgatcgatgaggaaaaaattgaaaagattatttcggagctgaccctgaaggaaaaagtagccatgtgccacggaaatggtttattccgcacggaaggggtgaagcgcctcaatattcctccgattaaaatgtctgatggcccgatgggtgtgcgtgccgaatttccggacgactcatggatgcctatcgggaactcggatgattatgtgacctacctcccgtgcaatactgcgctggcgagcacttggaatgtgaaccttgcccatgaagccggccgcgtcttagggaatgaggcgcgagggcgtgggaaagatatcattttgggtccgggaattaacattgttcgcagccctctgtgcggccgtaacttcgaatatatgtcggaggatccctatctgatcagtaagctcgcggttccgttcataaaaggcgtgcaagaaaacaatgacgtggcggcctgtgtcaagcatttcgccgtgaacaatcaggagactgaacgtctgaagatcgaggtggaagttgacgaacgaacgttgaaagaattatatttgccggcgtttgaagccgcggtaaaagaaggcaacacctatagcataatgaccgcatataacaaactgttcggttactactgcagccacaacgaatatctgattaaggaaattctggaggatgaatggggctttgatggtgtggtggtgagcgactggggcgcaatacatgatacagttgaagcggcgattgcgggtatggacatcgagatgaacgtgacttacaactttgatgaatatttcttcgcgaaaccactgattaaagcggtggaggagggcaagatcagcgaggaggtgattaatgataaaatccgtcggattcttcgcctgatgtataagatcaatatcttcagcgatgatcgtaaaagtggacgttataatctgccgaagcaccgggaaaaaaccctggatattgctcgtgagagcattgttctgctgaaaaatgaaaataatgttctgccgttaaaagattccaaaatcaaaactcttgccgtaattggcgagaatgcgaataccatgcatagtaatggcggcggcagcgctgaaattaaagccctgtatgaagtgacccctctgctggggataaagacacgactgggtggccagacggaagtaaaatatgccaaaggctatagcgcggataagtcagagaaagaaaaactgatcgaagaagccgtagagctggccaagattagcgatgcggttgtgattatcggcggattaaagcataccgcggaagatatggaactggagaacaacgcgctgactgttagcaaggataaagaaattaagcgttatgttgacagcgagggttacgacaaaaccgatatggatctcccatataaccaagatgaattaataaatagggtgctggaagtcaacaaaaacgccgtagtcgtaatgctgagcggcgcgcctgtgaaaatgactgaatggattgataacgcagcgaccgtggttcagacctggtacaatggcatggaaggtggtactgcattggccgaaatcctgtttggggacgtcaatccgtcaggtaagctgcctgtaacgtttccgcgcgagttagaagattctccggctcataagataggcgaattcccaggcggcgaaaaggttaaatataccgaaggtatctttgtgggttatcgctatttcagcacgtacgatgtcaaaccccttttctgctttgggcacggtttgtcatacaccaacttcaaatacgaagatctgaaaatatccgtaaatgaagaagtggccgatgtagacattagcgcggtgttcaaactgactaacacggggcatatcgatggcgccgaaaccgtacaggtgtacgttaaagatgcggaagcatcagtggaacgtccgaagattgaactgaaaggatttgacaaagtttacctcaaggcaggagaaatcaaggaaatcgaaattaaactggacaaaaaagcgctggcattctacagcgtggaagataaaaaatggaccgtagaacgcggaaccttcgagatttttgtgggctcgtcgtcagaagacattcgccttaacggggaaatcaaccttgagtcatcgtacaagttcaagtga

SEQ ID NO: 702 - DNA, 2193 bp, Artificial Sequence; identical to SEQ ID NO: 701
  6xHis UPI0002D21DB1

SEQ ID NO: 703 - DNA, 2385 bp, Artificial Sequence
  6xHis UPI000059C0CD
atgcatcatcaccaccatcatgaaaacttatacttccaaggctccatgctgttaccggttaaacggggggatcgttcgatttttcgcctggatgccggcgtatggcgtccggttcagcagattgattcgggtggtagcatgaagacaagcctgtttagatgcagcacaatagccagtgcatgtgcactgacaatgctcctggcgtcttgcggtggggatgatatacacgcgccggccgatcccgatgcagcggctgatctccgtgctgcggccttggttgcgcagctgaccaccgacgaaaagctgcaacttgtacacggcaccggtatgccggccctcaattttggtggcccgtttcctgcggatgcgctcaacggcgccagctatattccaggtgtaccgagattaggaattcccgcattaagctcagccgatagtgcggggggagtgaatgtaaaaaatgcccgcgtcaccgcacttccggctccggttgcacttgcagccacctgggatcctgcgttggccggtacctatggtactagaattgccctggaactgagggcactgggcttcgcggagggcttaggtggaggcgtgaacttagctcgcgaaccgcgcaatggtcgtacttttgaatacatgggcgaagatccggtactggcgggaacgttaagcgcggctcgcacccaggccacgcaggcccagaaagtaatcgccactatcaagcattttgcatttaacgatcaggaaactaaccgtatgaccgtcgattcagtcgtggacgaacgcacaatgcgtgaagcggaactgttggccttcgaaatcggcgtgaaagacggtcagccgggcaacgtcatgtgttcctacaataaactgaatggcgtgtacgcgtgtgaaaatccgtatctgttgacgacggtgctgaagaacgaatggggttttaagggcgtggttcagagcgattggggcgctacccattcaaccgtggcggcagtacaggcaggattagacgaagaacaacctggtgccgcagacgatggcaatgcgccccttgggagttattttaatagcaaactccgcgcagccttacaagcaggttccgtgtcagcagcacgccttaacgatatggtgcaacgcaaattacgtaccttaattcgtattggtgtgatggatgctccccctaaacccggtggtgccatcgacgaagcagctggaaatgcggatgctttagctatcgcgcgccaggcggccgttctcttaaaaaacgcggcggcgccgggtgatactcaaccagtattaccactcgccgctggtaccctgcgctcagttgttgtgatcggcggccatgcggacgccggtgtgctgtcgggaggcggtagcggcgcggtgccagcaattgatggcaacgccgtaaccagttgtcagcaaccggcgggcatgttatttggaggttgcgccacttggtataagtcggccccgttagcggcaatccgtgccaaagcgccgaatgcgtccgtgtcttatcgtgatggaaccgatgcgaacgcagccgcgaccgctgcggctcaggcagatgtggcgattgttttcgcgacacagtggcaaacagagggcctcgatcttgcgtcattgtctctgccggatgcaaaagccgatctgtataatcaacaatacgaccagaatgcgctgatcgcagcagtggcggcgaaagcgaaacgcgtgattgtcgttttagaaaacggcagcccggttctgatgccgtggctggcgaatgttcatggtgtattggatgcgtggtatccaggcgctcagggtggccaggccattgcagaccttctttttggagatgcgaatccgtcaggtcgtttaccgctgacctttccgaaacaagaagcggacttacctcaacctactattgatccgagtaacacccagaatgtttacgctgaaggccttgcttatggctatcgctggttcgacgcaaaagcgattgagccgctgtttccgtttggttatggactgagctataccacctatgccctctcagccatgagcgcgcgtgcagatgccgcgggcaacgtgaccgtaggagttacggtaactaatacgggtacgcgcgcaggtacccatacggtccagatctatgcggccctgcctgcgtccctgggtgaaccacccaagcgcctggtgggttggacccgtgttgcgttacagcctggcgaagcccgcacggtaagtgtggccgtgcccgcacaacggtttgcggtttgggacgcaaacgcgcatgcctggcgtattggagccggccgctacggtctgcttgctgcagcgagctcgcgcgatccacaggccttgagccagacagttaccttagccgctcattga

SEQ ID NO: 704 - DNA, 2307 bp, Artificial Sequence
  6xHis UPI00005CE9E7
atgcatcatcatcaccatcatgagaacttatatttccagggttcgatgccgcagctggacatgaaaccctttacctcgcgtcatcaccgaccccggccactggtactggcggttgtaatgggactgggcattgcacttgcggcaccgctggcagttgcccaaggagcccccgcatctcagccgtggatggatactgccctgactccggatcaacgagcagatcgcttattagctcagatgacagaagatgagaagtttcagatgttacgctcatatttcggtttggggacggataagatcccaaaacctgaaggtgccctgggttcagccggatatgtcccaggtatcgcccgactgggtattccggcgcaacagttggccgacgctggcgtgggtgttactaatccgggcggaattcgaaagggcgactacgcgactgccatgccgagtggtcctagtaccgcgtcgtcatggaaccgtcagctggcctataccgggggaaaaatcatgggtcgcgagtcatggcaacagggcttcaacgtccttttagcgggctcggttaacctgcagcgcgatccacgtaacggtcgcaactttgaatatgcaggggaagacccgttactcgcagggacgatggtgggcgagagtattcgtggcgtgcagtcggagcatgttttaagcacaatgaaacattttgcgctgaacgatatggaaacccgccgcaattttcattcggcacagatcggcgagcaggcgatgcatgaaagtgacttgctggcgttcgaaattgccttaaaaattggcgatccggccagtgtgatgtgctcgtacaacaaaattaatggcacttatggctgtgaacacgactacttactgaatcaggtcctcaaacaggaatggaaatacccgggctatgtaatgagcgattgggggggcgtacactcaggctcgaaagccgcccttgcgggtctggaccagcagagtgccggtgaagtttttgatgcggccgtttttttcgatacaccgctccgcatggccgtgagtgcaggcgtagttcctcgcgcacgtttcgatgatatggtgcgccgcgtgctgcgttctctctttgctcatggagcttttgactatccgacccaacgccaacccatcgacggcaaagcggggttattagccgctcagcacgttgctgaagaaggttcggttctgttaaggaatgaacaagccactctgccgctttctcaggaagtccgccgtattgcagttatcggtgggtatgccgataaaggcgtgatgtcgggtggcggttcttcccgcgttgactatacgatcaacggaggtaatgcagttcccgggatcaccccgaccacgtggcccggcccggtgattattcacccgtcaagtcctttacaggcgcttcgcgcggcgctgcccaacgcacaaatcgattatgtcgatggtacggaccgtgcagcagccgcgcgcgccgccaaagcagctgatgtcgccattgtttttgcaacgcagtgggccgcagagagtgtggatttacctgatatgaggctgcccgacaatcaagacgccctgattgaagccgttgcgaaagccaatccaaaaaccactgtagtcttagaaacaaacggaccagtccgcatgccgtgggccgagcgcgttccggcagttctgcaagcgtggtatcccggcattggtggtggagaagccattgcgaacttgttaacgggcgcggtgaatcctagcggccatctaccggtgacctggccggtagacgaatcacagctgcctcgccccagtattcctggcttgggctttaagccggcgaaaccaggtgaagacacgattgactatgcaattgagggcgcgaacgttggttataagtggtttgccgctcgcaaattgacgccgcgttatccgttcgggcatggtctgtcatacacccagtttcgcatgggtggtctgcaggtagaggcatccggctcacagcttaccgcttctttcgaagtagagaacacgggctctcgtgagggcgcggccgtcccgcagttatacgttacactgcctgatggccatgcaacccctctgcgtcttatcggttggcaaaagctgaccctgaaaccgggcgaaaaacgcagcgtgcaagttgtggcggagccccgcaccttagcagactttgacgcacaggcccgtcgctggactattgcagcgggcacataccgtgttcaattagcccgatcagcttccgaacctgtgcaaacagcccaggttacattgcaagcagcgcagctcccttga

SEQ ID NO: 705 - DNA, 1455 bp, Artificial Sequence
  6xHis UPI00000C7604
atgcaccatcaccatcaccatgaaaacctgtacttccaaggttcaatggccctggggggtgcagcacttggcttatcagcgtgcgaagggccgggtgaaacggatctgactccgaaaggccgtcagtttccgaaagattttgtgtggggagtggcgacggcggcgtttcaaaccgaaggcagccaaacagccgatggtcgaggtccctctatctgggatgtcttcgaacgtgttccaggccacgtcaagaacggtgataccgctgcagatgcgaccgatagctaccgccgatatcaagatgacgtagatctgatcgcaggtgccagtttgtcggcctatcgctttagtatgtcttggtcccgcattctgcctaccggtgctggtgccgtgaatgcggccggtctggatcactatagccgcttggtggatgcattattggcgaaagggattaccccctatgccaccctgtttcattgggacttgccgcaaggcctgcaagacaaaggcggatgggccaaccgtgacaccgcacagcgtctcgcggattatgcgcgtgcggtggttgaacgcctgggcgaccgtctgaaaaattacattatcctgaacgaagcggccgttcacaccgtgtttggccatgtgctcggtgaccatgccccaggcctgaaagacgccgcgttgctgggtccagtgacccaccacatgaatttaggccaggggctggcaatccaagcactccgtgcggcacgttcggatttgtcagtgggaaccacgatggcgctccaaccttgccgtccggcaggaggccctttggcattttggaaccgtctggcttcggatggccttgacgagatctggaatctggcgtggttggatccgttgtttaaaggcacttacccgaaagcgatggaagaaccgctgaaaggggttgttcgcgatggtgacctaaaaaccacacgccaacctgtggacttcctgggcgttaactattatgccccggcgtatgtgcgcttggacctgagcgcaccgtctaaaatagctgcggctgcagcgccaaactctgcggaacaagacgcgtttggtcgtcatatcgacccttcgggtcttttcgaagtgcttgaccgtgtccgtcgcgaatatggcgccccgaaaatgctggttactgagaatggctgctcagatcctttttcgagcggtccagccatcctcgatgataccttccgtattaagtacctgcgccgccatctggaagcggttttggcagcgcgtgaagcgggttgtgatgtacgcggttactttgaatggaccctaatcgataatttcgaatgggaccttggctatacctcaaagttcggcatcacgactatggaggcggcatctggacgtcgtattccgaaggcgtcgtacggatggttcaaagcgttagcccaaacgggtaccttaccgagcagtccatga

SEQ ID NO: 706 - DNA, 2271 bp, Artificial Sequence
  6xHis UPI000338772A
atgcaccatcaccaccaccatgagaatctctactttcagggctctatgatgatccgctcacgcgtcaacaaaacggtggtctgtctctttattatttcctttttccatgtcatggtacatggtcaaatgattcaaccgcaggaactgaaaccgctgagcaacttccagggctttccttctggctcgatttatcagaatgtgaatcttgcgccggaattacgtgctcgtaacgtaatcaactacctgagcttcgatgaaaaactgtcattgaccacaggtattctgggcttctgctttcctggcattccgcgcctaggcttgcgcgcggtggttatggcagacgcaagccaaggcatccgcctgagcagtatccagtcagacacggaatctgtgagcttccctagcatgcaggcactggccgccacgtggaatccgaaaattgcccttgatttcggtactgcgatgggtgagcaatgtaaattgcacggagtggatgtgctgctcggaccgggcatcaatatgcagcgcacatccgagggcggtcgtaactatgagtatatgggcgaggatccgcttctgaccagcaaaatcgctgtcgcgtacgtaaagggcattcaagcaaaaggcattgttgcgactgctaagcactttatctgtaatgatcaggagtttgtgcgacacattgcatcaagcgatgtgagcgaacgtactctgcgtgagatttacttaccgccgtggaaggcccttattgaacaggcgggcttacgtgcgatcatgacaggcaacaacctggttaatagtattcccaatacgatgaacaaaccgctcctgaacgatattctgcgcgacgaatatcactttaagggactggcaatgaccgactggcagaataccaattattatccgttccaacagtacctcgtgccgatttcaggcatcagcctgctcatgccggagaacaaaacctttgccaactatattaagtcttacctgacgaaatacccagacaaactgaagaaaatcgaaaatgaactgaacgacatgattagttacaacctctacacgttctttgaggccggtatttatgatcgtggcgccgttgatgtcgcgatggcaaagaaggtcaagctgcatgagaaactagcggaacagtgtgcggatgaatcgatttgtttgttaaaaaacgagcaggacatcctgccggtgagtgtgcgcaaaaagattttactgacgggcctgccggaaatttatagcggcaagggtagcggatttgtaaagggtttcaatcacgtggactttgaatcgggtctacgtagcgcgtatggtaataatctgattagcgaaccgaaaccgacagatgaacagatccagaaggccgatgtggtcatatttcgcttaagtaaggaggccggtgaaggatacgatgtaccgttcattggcgcagatagctcgtcgaccacgattcagaaactgtgccgcttaaataaaaatgtcatcgtcttggtttcatcaggcaatggcattgagatgccgtggattcagtctgtcaagggagttctgtggaccttcatgttaggtcagcaacgcggtgccgcgctagcgaatgtgatcacgggcaaggtgaacccgtccggcaaattgccgtttacgcttgaaaaagacattcaggatagccctgcgcctgaatttaacttcctgggtggcaaaccgtattggcacggctctaaccgcttttataaggactactggaaaggaaccgataccaccacggcaaaaattgagttagccaaatacgtcaagccgaatcagcttgtgcatatcccgtatacagaaggtgtgtttatgggttaccgctggtatgagaagtataataagcctattcaattttgtttcggctatgggctgtcatatacccagttcgaattcaaaaatctgaaaatttcccgcacctccattccctcgaaggactcactgattgtgagcctgcagattcgtaacagcggcaaagcacgtggggcagaagtggtccagctgtatctgtcggacgtcaaatctagcgtagaacgcccgctgaaggaattaaaaggttttcagaagatctacttacgttctggcgaacagcagacgatcaaattcgtaatacaccccgaagatctggcgttttgggacgagaacaagaacgcgtggaatgcggaacccggtgattatgaaattatgattggcaattcatcccaggacattaaattgaaacacaaatttaaactgctatga

SEQ ID NO: 707 - DNA, 2352 bp, Artificial Sequence
  6xHis UPI00035A4604
atgcaccatcatcaccaccatgaaaacctctattttcagggcagcatgattaaaccgctgcttaaacctatgaagattaaactgcaccgctttttcaattaccgtctgaacatcctcgatcctattagcaagtcgatcaaaatcacgcagatgaaaaaaatcattttcgcgctgagtgcgattattatgatcacgtgcgccgagaacacgaaaaacaacacgtctgactataaagacaaaaacgccccgattgaagatcgtattgagcatctgatctcgctgatgaccctcgatgaaaagattatgcaaatgaaccagtggacctacggtaagaacgcaaacccaaacaatattggcgagaagatgcgcgaagtaagcccggaaattggcagtctgctctaccgttcaacgaacccggaataccgcaatcagatccagaaaaaagcaatgaccgaaagccgtctggggatccctatcatttttggattcgacgctattcatggttatcgtaccatcttcccgatacctctcgcccaggcgagtagttggaacacggagcttgtgcgagaatcctctgcaattacagccaaggagagctggctgtcgggcctggattggaccttttcgccaatggtggatgtggccagggatgcgcggtggggccgtgttagcgaggggtacggtgaagatacctatgccaactcagcatttgcagtagcggcggtgcaagggtatcaaggcagcaatctgaacgagaaatacacgattgccgcctgcctgaaacatttcatcggctatagcttgtcggaaggcggtcgcgactatcattattcggatgtatcaaatcagacgctgtgggaaaccttcatgccgccgtttgaagcaggcgtaaacgcgggtgccgcgaccctcatgtcaggctttaacgatatctctggtattcccgcaagcgctaatcactacaccttaaccgaagtactaaaggaaaaatggaaacatgacggcttcgtggttagcgactggggaagtgtacgaaacttagtagaacaaagtgtagccaaagatttgaaggaggcaacgcagaaagcctttatggccgggatcgaaatggacatggttgacaatgcctacgtggattacctgccggaactggtagccgaaggcaaagttcccatggaaagcatcgacgaagcggtccgccgtatcttacgtgttaagatgaaactggggctgttcgagaatccctatgttgacgtcgtctccgaagaggaacgctatctgctgccagagtatttagaagttgcggaagaactcgcaagcgagagcttcgttttacttaaaaatgaaaacgagactctgccgattacgagcaaatataaaaatttggccattatcggcccgatggtgaaagacagtgtccatatcatgggtttctgggaaggtatgggtcgtccggaggacgttaaaacaatctatgagggcctggagaaggagtttaagaacaaggcaacccttaactatgccctgggttgcgattatgatggagacgatactagtggcttcgacgccgctctgcaagccgcgaacaatagcgatgcgattgtattatttttaggcgagaaacgccactggtcaggtgagaacggatcgcgctccactattgcccttccgaaaattcaggaagacctggtggcggcgttgcgcaaaacgaataaaccgatcatcctcatgctgtcaagcggccgtcctctggagttaattcggctggaaaaaatggcggatgccattgtcgagatttggcaacctggcactatggcaggaccggcagtcgcaggactgttgtctggtcgacataaccccagcggcaaactgcccatgaccttcccgcagactactgggcaaattccgatttactataacatgcgccaggcagcccgtccgaccctgggtcactatcaagatatccctcgtgatccgctctactggtttgggcacggtctgagctatacaacttacgattattctgcgataaagctgtcatcgaagaagatcacgaaagaccaaacgcttattgccgaagttgaagtaaccaattcgggtaatctggatgggaaagaaagcgtcctttggtttctgaaagatccgtttgcctcaattagtcgtccgattaaagaacttaaacacttcgagaaaaagagcatcaaggcgggggagaaagtggtttaccgttttgaaatcaaacctgaacgcgacttaagctttgtcgactcgcagggtaatcgtcacctggaaagcggcgatttctacgtgattattaacgaccagaaagttcattttgaactggtggaatga

SEQ ID NO: 708 - DNA, 2244 bp, Artificial Sequence
  6xHis UPI0003C4ED6A
atgcaccaccatcatcaccacgaaaacctttacttccagggttcaatgaaaaccaaagaaacgcacctggaagagaataccgtcagcacgcaggtcaaacacttactgtcccaaatgactttggaagaaaaggtcgggcagatgacgcagatcgattttagcatggtcggtgtttttgaggctcaagacgcgaaacatccaattgattcggagaaactcgaagaagccgtgatcaaacatcacgttggcagcattctgaattgtccgtcgaccccacataacaaagctcagccgattgagacctggcgtcacatgatgcaagaggtagaaggcgtgtccgcaaaaacgcgcctgaaaatccctgttatttacggtattgatgcaatccacggcgctacctataccaaaaatgccgtgctgtttccgcaggcgattaacatggcggcgacctttaatactgaactgtcgttcaaggagggcgagattaccgcgcgtgaggttcgcgcctctggccagcactggaattttgcgccggttatggacatcggccgtcagcccctttggccgcgcttgtgggaaacctacggggaagatgtgcatctggcaactgcgatgggcaccgcctatattaaagggcaccagggggataacttttcggaaccgaccaaagttccgacatgccttaaacactacgtaggctattccttccccatcaacggaaaggatcggacaccggcatggatcggtgaacgaatgttgcgcgaatacttcttacctaccttcgaagccggcgtaaaagcgggctctccgacggtcatggttaattcagccgaggttgacgggataccgggccacgcgaactaccattatctaactacgattctgagagatgaaatgggctttaagggctttgtggtttcggattgggaagacatcaagcgtctctacactagggataagctggcggccagccccaaagacgcggttaagattgccgtgatggcgggtgttgatatgtcgatggtgccgtttgatttttctttctatggacttttactggagctagcacagagtggcgaagttccaatgtcacgtatcgacgaagcagtgcgtcgtatcttgaccgttaaatatcaggcggggctttttgaacacgaccgcaaacaattacccgtcgagtcaaatttcgcaacgccggaagcgacggcgatcaatcgtcaggctgcacgtgaatcgattatcctcgcaaagaactcaaatcagatcctgccggtaaaaaaagaagcgaacatcctggtgacggggccgacggcagatcttttatccgtgatgaatggtggctggaccattacgtggcaaggccatgcagaagaattgtatccgcaagataagttgactgtcctgaaagcgttacagaaaaaatcgttaggcaaaattacctatctgaacggggatgtacgtgccgatgagaaggccatcgataaagtagttgcggaagccaagcatcacgatgttgttttgctgtgcttaggcgaacagccgtacactgaaactgtaggcaacattgaaaccttggcgttagaacctactcagatggaacttgcggaggccgccattaacacgggcaaacctgtaatccttctgacgctgggtggacgtcctcgcattattactagcatcgctaatcaagcggcgggcgtgatcttgggctttcttccgggtatggaaggtggcgaggccattgccgatattatttatggtgattacaacccggacggtaagttaccgattacgtatccacgaaatactaacggcatcaccctgtatgaccataagccgatggaatcgttcgaggggaatgtgtataaccctttgttcccgttcggccatggtctgtcatatactacctttgccacggatggcctggccgtagacaaagaacagattaagtgggacgaaaatgtcaccgtgacggtcaatgtgtcaaatattggcacccgcctaggtaaggaaactgtccttctctatattcatgatgttgccgcaagtgttactcgcccgaataaacagctcaaagccttccagaaagtagaactggaaccgggcgaagcgaaaaagctgtcgtttaccttgagtccttacgatctgtcattcattggcgttgatctgaagcgtgtggtggagccgggtgaattccgagtgatggttggtaatgagaccgccaatttctgggtgactgaatga

SEQ ID NO: 709 - DNA, 2472 bp, Artificial Sequence
  6xHis UPI0003E05C04
atgcatcatcaccaccaccatgaaaatttgtactttcaagggtccatgaatcctaaggccgttggctgggaatctgcctatgcccaagcacgtgattttgtgtcacagttaacccttctggaaaaaattaacctgacaactggcgtagggtgggagaatggcccgtgtgtgggcaataccggctcggtaccgcgtctaggttttaaaggaatctgtaaccaggatagtccgcagggagtgcgttacgcggattatgtttcggccttcaccagcgggcaactcgccgcagcgacttgggaccgtggtttactgtatgcccgcggcgtcgcaatggccgaagaacataaaggtaaaggcgctaccgttcaattaggtccggtggcaggtccgttgggccgtgtaccggaaggtggccgtaattgggaaggctttgcagccgatccaatgctgaccggcgtggctatggcggaaaccatcaaaggcatgcaagacacgggaattattgcttctgcgaaacacttcattggaaatgaacaggaacgttttcgtcaagtgggggaagccgcccagtatggctataacatttcggataccctaagcgccaacatcaacgatcgcacactgcatgaaatgtatttatggccgtttgcagatgcggttcgtgcaggcgtgggctctattttgtattcatacacccagattaacaactcttacggttaccagaactctaaaacgctaaataatatcctgaaaggcgagctcggatttcagggctttgtggtgagcgactggggcggacaccagtcaggcgtttcgtcggcactggccggtatggatatgtccatgcctggcgatacggcttttgatacctcgtacactttcttcggcaccaaccttacagtggcgattctgaatggtacgatgccttcatggcgtctggatgatatggccatgcgtattatggcggcgtactttaaaattggcaacacgattgaagaccagccagatgtcaacttcaactcttggacaacccagacgaatggctttaagtacgcatttggtaaagaagactgggaacaggtgaattggcatgttgacgttcgcagcaatcatagcgaattgatccgtacggtagccgccgccggaaccgtgctgctcaagaacgatggcgctctgccgctggaaaaacctaagtttattgcagttttcggtaaaaacgccggcccgagcccgatctcgccgaacggctgccctgatcgctcatgtgataaggggaccctggctataggctgggggtcaggcaccagtgaatttccgtacctgattactcctgactcagtaattcaggcccgggtagtggctaatggcggactgtacgagagcatttttaacaacagcgatcttgattcaatccacgccctggcctcgcgccctgacgcaacgtacatcatttttgggaacgcagatagcggcgagggttacctgaacgttgacggtaatgaaggcgaccgtaataacccgactttctggcaaaatgcagacggcgttattcacaatattagcgccacgtgtaataataccattgttgtgattcatagcgccggtctgccgggcgaacagagcggtaatagcctgattgatatcctgtacggcaacgtcaatccgtcaggccgaacaccgttcacctgggcgaagcgtcgtgaagactatcgagcggatgttctatatgaaccgaataatcgcggcggcgcaccgcagcaggaattcgtcgaaggagtctttattgattacaggcacttcgaccagaacaatatcgaaccggccttcgagtttggtttcgggctgagctacacgacctttaattatagcgacctgaaaatcactcgcaagaacattacggcgtaccaacccaccaccggcactacccaagcggcgcctgttctgggcgcgaattacagcactaatcttgaggattataagttccccgacacctggcaatggattttggcctattgctacccctatgttaacgatacgagcagcctcgaagccgcatccatggatccgtattacaattcgtcattagacttcattccggagcacgcgcaggacggctctccgcaggccctggtgggggcgggcgatgaagtagaaagcggaggaaataaaatgctttatgatgtgttctacgaggtgcaggcaagcatcactaacaccggcccgttagcaggttatgaggtagcgcagctttacttaagcttaggtggcgacaacccgcccaaacaactgcgtgggtttgatcgtctgtgggtggaaccgggtgaaaccgtgatcttcaacgcgagtttgacgcgtcgagacttatcgaactgggatacctttacgcaaaactgggtaattaatgatgcacctaaaaccgcctttgttggttcctctagtcgtaagctgttcttagaagcagctctggaatga

SEQ ID NO: 710 - DNA, 2640 bp, Artificial Sequence
  6xHis UPI000434E698
atgcaccaccatcaccaccacgagaacctgtacttccaaggcagcatgccaagtcaaggaaatccgtctcgtgacgtcgagcacctgctcagccttttgacactggaagagaaggtttcattattagcaggtgccgatgagtggcagacacaaggcatcgagcgtttaggggtgggagtggtcaagacaaccgacggtccagcaggggcgcgtggcaaattaatggttgacgggccccgtgcagcgtttcttcccgcccccgtgcttcaagccgctacctggtctaaggcggacctcaaatggattgggcaattactctgtaaggaagcgaaaacaaaaggcgcgcaagttttactggcgccgactatgtgtggaatccgcaatccgcttggtgggcgtaatttcgaatcatttagcgaggacccgttcctttcaggtagtttggcgatcgaatacgtcgcaggtctgcaagagactggtgaggtgcaggccactgccaagcacttcgttgctaatgagcaagaattcgagcgtttctctattgacgcaatcatcgaggagaaagccttacgtgagatctacttacgtcccttcgaaatgcttgtgaagtcgagtacaccccctggatgcatcatgacggcatataactgcgttaacggggttcatatggacatgaatacacgtattgttcaagggatcttgcgcgatgaatggaagtttgacggattggtgatgtctgactggggcgggactaacagtacgatcgaatcagtcatcgcggggtgtgatctggagatgcccggcccgggtgtacgccgcggccaaaagcttttggacgcgttaaagagtaataagtcggccgatcttcctgcggcggtcgatgagtgctgtaagcgtgtattaacgttagcaaaacgtatgaaccttctgggcctctctgaggctgaggtcaaggcctcgcgccgccgcccagagatctctgccactacagccgccgatctccaatctctccgtaagattgtaagttacggccacgtgctcttaaagaactcctcaggaacccttccgttgagcccgaatactcttcaacgcaagaaggtagcgttcgttggtccgaatagcaaaacatgcactgcaggcggcggcggttccgcgagtatgaacccgcaataccagagccatcctttggatgccttcaaggcaactacggcgaagctgggtttagacgtggaagttcattatgccatgggcgcgtattcgaacaagtggctccctctcactagctccgatcaatggtcagcacaatcctcgcaacaaggccagtctatgttcaagcttgagttctttgccaatgcagactttggcggtccagtggttgatacccagtaccgcaacaactcatccatcgacttgactgactctggtccggctagtttgcgtgaagtagccaagccttactcagtgcgcgctacatcgtaccttcgcccaacagccagcgggaaacacaatctgtcaatcacttcggtgggtgacagccgcctgtttgtcgacggtaagctgctcattgacaactataactggacagaacgtggggaagccttctacgcattctcaagtgtcgaggttagcgctgcaatggaaatgacggccggacaaacttacaatattgtaatcgagacggcttcccgtatgtccggtgaagtcgaccgcgataatcctgttcatgtgtggtctatgcagccttcggtgcgtgtcggataccttgaagagctgccccgcgacatggtcagcgaggctctcacccttgccaaccgctgcgattatactatcgtagcaatcgggctgacagacgaatgggagtcagagggctatgatcgccaaaccatgagccttcctggaaaccaagaccagctcgttcaaactctgctggagcaggcaaaccgtcctgaatcgatcatcgttgttaatcaatcgggctctcctgtggagatgccctgggctgaacaggctcctacaatcctgcaggcttggtatggcggccaagaggcaggaaacgcacttgcagacgtcttgttaggtcttacgtcgccatctggccacttacccatttcatggccccgtcgctacgctgaccttcactttagtaaccacgcagaggtatggcctggagtcggcggtcgcgtggtctatagtgagggaacgaatgttggttatcgttggtatctcaacgagggcgtggatccccaatggtggttcggccatggactggggtataccagcttcactacctcagtcgtggaagtcattaaccatcctcaagaccaagggtgggacatcgtggttgacgtacacaataccggttccttcgatggccagcaggtagtacaggtatactcctggcccgagcaagacccaaaggcgaaggaactccgtgcctttgagaagacggggtcactgcgtccaggcaccaagcaacgtgttactatttgtgtcaagatgcgtgatatggcacattggatcgagggacaatgggtcctggaagcaggcaagtatctcctcggcctcggtgagcacgcaggtgcggttgacgtcgtagccgccgtcgactacgttccgcaaacaacggtatggggtgtgtaa

SEQ ID NO: 711 - DNA, 2571 bp, Artificial Sequence
  6xHis UPI00001268FD
atgcaccatcatcaccaccatgaaaatttatatttccagggcagcgatgaactcgccttttcacctcctttctatcctagcccgtgggcgaacggccaaggagaatgggccgaagcatatcagcgtgctgtggcaattgtttcgcaaatgactcttgatgaaaaagtaaacctgactacaggcacaggctgggaactagagaagtgcgttggccaaaccggaggggtgccacgtttgaatattggcggcatgtgcttgcaagattcaccgttaggcattcgtgattcagattacaattctgcatttccggctggagtcaacgtcgcggcaacctgggacaaaaatctggcgtacctccgtggccaggcgatgggtcaagagttttcagataaaggcattgatgtgcaattaggcccggcagccggtccgcttgggcgttcgcctgatggtggccgcaattgggaaggctttagcccagatcccgcacttaccggcgtgcttttcgcggagacaattaagggcatccaggacgccggtgttgtcgccaccgccaaacattacatcctgaatgaacaagaacattttcgtcaggtagctgaagcggcgggctatggcttcaatattagcgataccatcagctcgaacgtagacgataaaactatccatgaaatgtacctgtggccgtttgcagatgctgtgcgtgccggggtcggcgccatcatgtgctcatataatcagattaataacagttacggctgtcagaactcctataccctgaataaactgctgaaagcagaactggggttccaaggcttcgttatgtcggattggggcgcacatcatagcggagtcggttccgccttagcaggtttggatatgtcgatgccgggggatattacatttgactccgcgactagcttctggggcaccaatttgactattgcggtattgaacggcaccgttcctcaatggcgtgttgacgatatggcagtacgcatcatggcagcatactacaaggtaggtcgggatcgactgtaccagccgccgaacttcagcagctggacgcgcgatgaatatggattcaaatatttttatccgcaggaaggcccttacgaaaaggtcaaccactttgtgaatgtacagcgtaatcactcggaagtaattcggaaactgggtgcggatagcaccgtactgttgaaaaacaacaacgcgctgccgctgaccggtaaggaacgtaaagtagcgattttaggtgaagacgccggctctaactcgtacggagccaacggttgcagcgatagaggttgcgataatggtaccttagcgatggcatggggttctgggacggcggaatttccatacctagttacaccggaacaggctatccaagccgaagtactcaaacacaaagggtctgtatatgcaatcacagataactgggcactttcacaggtggagaccctggcgaagcaggcatcggtgtcattggtattcgtgaacagcgacgcaggtgaaggttacatctcagtagacggcaacgagggggatcgcaacaatctaacactctggaaaaacggggacaatttgataaaagccgccgcgaataactgcaacaacacgattgtggttattcattccgtcggaccggttctggtagatgagtggtacgatcatcctaacgtgaccgccatcctgtgggctggtttgcccggccaggagtctggtaactcgctggctgatgtgctatacggtcgcgttaacccgggggccaaatcaccgtttacctggggaaaaaccagagaagcgtatggcgactatctggtgagggaactgaacaatgggaacggcgcgccacaagacgactttagcgaaggcgtgttcattgattaccgcgggttcgacaagcggaacgaaacgcctatttacgaattcggacacggtctgtcatacaccaccttcaattactcgggcctgcatattcaggtgctgaatgccagttcgaatgcacaggtagcaaccgaaaccggcgcagcgcctaccttcggtcaagttggtaatgcatcggattacgtgtacccggaaggcctgacacgcattagcaaatttatctacccgtggctgaatagcaccgatctgaaagccagtagtggcgacccgtattatggcgttgatacagcggagcatgttcctgaaggtgctactgatggctcaccgcagccggttctcccggccggtggtggtagtggtggaaatcctcgcttatacgatgaactgattcgcgtgagcgtgaccgtaaaaaacaccggacgtgtcgccggtgatgcggtaccacaactgtatgtttctctgggcggtccaaatgagccaaaggttgtgctgcgcaaatttgatcgcctgaccctcaaaccgtctgaagaaacggtgtggactacgaccttgacccgcagggatctctcaaactgggatgtagctgcccaggattgggtaatcacctcttatccaaaaaaagtacatgtgggtagcagctcacgccagctgccactccatgccgcactcccgaaagtgcagtga

SEQ ID NO: 712 - DNA, 2211 bp, Artificial Sequence
  6xHis UPI0000DD5996
atgcaccatcaccatcaccacgagaatctatacttccagggttcaatggaaaaagtgaacgaaatactgagccaactgacccttgaggagaaagtaaagctggtagttggtgtgggactgccgggtctgtttggtaatccacactcacgtgtagcgggtgccgcgggcgaaacacacccagtaccgcgcgttggtctgcctgcgtttgttctagccgatggacccgccggactgcgtattaatccgacccgtgagaacgatgaaaacacctattatacaaccgcgtttccggttgagattatgctggctagcacctggaaccgagaattgttggaggaggtcggcaaggcgatgggagaagaagttcgtgaatatggtgtagatgttttgctggccccggccatgaatatccaccgcaaccccctttgtggtcgcaacttcgaatactacagcgaagatccggttctttcgggtgaaatggccagctcttttgttaaaggagtgcagagccagggcgtgggagcatgcatcaaacattttgtcgcgaacaatcaggaaactaatcgtatggtggttgataccatcgtcagcgagcgtgccttgcgtgagatttacctacgtggctttgaaatcgcggtaaaaaaatcaaaaccgtggagcgtcatgagcgcttataataaattgaatggcaaatattgcagccagaatgagtggttgctgaaaaaagtgttgagggaggaatggggtttcgagggctttgtcatgagtgactggtacgcaggcgataacccggtcgaacagttgaaagcgggtaacgatctgattatgcctggcaaagcatatcaagtgaacaccgagcgacgagacgagattgaggaaattatggaagcacttaaggagggcaaattatcggaggaagtgttagacgaatgtgtgcgcaacatcttaaaagtcctggtaaacgcgcccagcttcaaaaactatcgctacagcaataaaccagatctggaaaaacacgcaaaggtggcatacgaagccggagcggaaggcgtcgtgctgctgcggaatgaagaggcactgcccctgagcgaaaactcaaagatcgcgctttttggcacgggacagattgaaaccataaagggcggcacaggatcaggtgatacccacccgcgctatgcgatcagcattttagaaggtattaaagagcgcggcctgaattttgacgaagaattggctaaaacgtacgaagactatatcaaaaaaatgcgagaaacggaggagtacaaaccacgccgcgatagctggggcactattattaagccgaaactgcccgagaattttctgagtgagaaagagattcataaattagccaagaagaatgacgtagccgtgattgttatctcccgcattagcggcgagggttatgatcgcaagccggtgaaaggcgacttctatctttcagacgatgaaacagatttgatcaagaccgtgagccgggagtttcatgaacaaggtaagaaagttattgtccttctgaatatcggaagcccggtggaggtagtgtcatggcgtgatttagtagacggcatccttctggtgtggcaggctggacaagaaaccggccgcattgttgccgatgtgctaacgggccgtattaaccccagtggcaaactgccaacgacctttccgcgtgattattccgatgttccctcgtggaccttccctggcgaacccaaagacaacccgcagaaagttgtgtatgaagaagatatctatgtcggctatcgttattacgacacctttggcgtggaaccggcgtacgagtttggctatggactgtcttataccacttttgagtacagtgacctgaacgtatcttttgacggtgagactctgcgcgttcagtatcggattgaaaataccggtggtcgcgccggtaaagaggttagtcaggtgtatattaaggccccgaaaggtaaaattgataagccattccaggaactgaaagcttttcataagacccgtttgttgaatcctggtgaatccgaagaagttgtgctggaaatacctgtaagggatttagcgagctttaatggcgaagagtgggtggtggaagcaggcgaatacgaggtgcgcgtgggtgcgagtagccgtaacattaaacttaagggtaccttctcagtgggtgaagaacgccgttttaaaccctga

SEQ ID NO: 713 - DNA, 2298 bp, Artificial Sequence
  6xHis UPI0002B666E8
atgcatcatcaccatcaccatgaaaatctgtatttccagggcagcatgatcaatcgagaatccaaacagaaagaatttattaaacagtactatgaaaaacgcatcgatgatttaatcggcaaaatgaccctggaagagaaggtgggccaattggtgcaaattagcccgtccattttcggagcatttggccttacattcgacgaaaccatcgaaaaactgattaacggtgaaatcactccggctgaatttgaggccttagaacgtaactatcgcgaagatgaaatacgtcagggaaccctgggctgtatgggaggagttcatggggccgaaaaatctaacgaattgcagaagattgcggttgaggaaagcagactgggtattccgattctgttcggtctggatgtgattcatggctatcgcactattttccctatcccattggccgaggcctgcagctttgatattgagaaaattaaagaaagtgcacgtattgctgcgaaagaagcgtccgcagcgggcctgcattggacgttcgcccctatggttgacattagccgtgacccacgctggggccgcgttgccgagggcgctggagaagacccgtatctgggctcagtgattgcgaaagcccgtgtggaaggtttccaaggggagtccctggataaccccgaatctatcctggcctgtgccaaacattttgcgggatatggtgcacccgatggcgggagagactataacacggtggacatgagcttgcaaacgttgcacgatgtgtatttaccacctttcaaagcagcggcggaggctggggtgggtacttttatgagtgcgtttaacgatttaaacggcattccgtgcactgttaacaaatacttgttgaccgatgttctgcgtgagaagtttgggtttaacgggtttgtcgtctcagacgcgaatagcattccggaagttgtggtccacggatacgcggaagataataaggccgcgagtaaaaaagcgctgaatgcgggccttgatatggatatgagccagggtacctaccgcaacgagctaccggaactggtaaaagagggagatattttagaggaagttctggatgaagcagtgcgtcgtgtcttacgcgttaaatttctgctagggctgttcgacaatccttatcgtacggatgcgaagaaagaagaaaagacactgctttgtaaagagcatctggaagcggccagggatatcagccgtcggtcaattgttctgttgaagaacgagaacaacgcgctgcctctcaaaaaagatctgaaaaaaattgcagtggtcgggccgctggctgaaaacgccgcagagatgttaggcacgtggagccatacaggtaatccgagtgatgttgtcaccattatttccgggatcaaagccgccgttagcactgaaaccgaaattctgtatgctgagggctgtaagatcactggcgaggaatgtattgattttgagggcgcggtccgcgtggctaaagagtccgacgttataatcgcagtggtgggggagaattctgacatgtcgggagaagccgcaagtcgcatagatatcaacttacctggtaagcaggaagaattactgaaagagctacgcaaaattgggaaaccgctgattgtcgtgctgatcaacggtcgcccgctgacaattccgtgggaagcagaaaatgtagacgcgctggttgaagcctggcaactggggacccaaagcggcaatgccatcgcggacgtgctgttcggagattacaacccatcgggcaagctggtcgccacgtttccgtacagtgtcggacaggtgccgatatactacaataacccaatgacaggccgccccgcaggaaaaataaaatttacctcaaagtacattgacggcccagcagaaccgttatatccgtttggctttggtttgagctacaccaccttcaagtatgaaaacctaagcatcctgagcgccgagaataagattggtgacaccgtggcggtgaaggtatacgtgaccaacaccggcgaagtgtcgggtgaagaagtggttcagctgtatgtgagcgatgtagtggcatcgcgtgtgcgtccggtcaaagagctgaaatcgttcgaaaaagtgctgctgcagccgaaagaatgtaaaaccatcatttttaaattgaacacaaaagacctggggttccatgacgaaaatatgaattacgtggtagagccgggtctgttcaaagtttacgttggcaccaatagcaaagaatgcctagaaggtgagtttacgattgtggcgctagattga

SEQ ID NO: 714 - DNA, 1440 bp, Artificial Sequence
  6xHis UPI000006B001
atgcaccatcatcatcaccatgagaacctgtattttcaagggagcatgggccttaacaaacaggacctgtacatctatcgtaaacagtatggagtaaatctgggcgcctggttctgtgccgaacgttggatcaacgactttctgttcaccggggagggctcttcggaattggaagctgtgagtggcaacgtgaaagcacacggtatcgacaaagctcgcgaaaattttgaagcccactggaagagctggatcggcatcgaagatttttcgtatatgaagcagcaccttgtgaactcagtgcgtatcccgctgggatactggtcgctgggtaacgatgaactggtgaagggtactccttttgaaccgtacgccgaagtgtaccgtaacagcctgcacatcctgtgcgaaaaaattcaggaagcgggcagcctgagcatcggcgttctgctggattttcatggggtgtatgggggtggaaactgcgatgggcattcgggcacgagcagcggtaaagccgaattctatgaaaagcaagaataccaggatcgcaccgtggaagccgtgaaattcctgtcgagcaagatcggacagttcgaaaacgtaatcgggattcaggtcatcaatgagcctatttggggtcagtatgatgtcctggcaaacttttaccagaaggcccgctctgtggtgccttcgtacctgcctgtgtacattggtgacgggtgggataaagatcattgggtaaactgggtgaatgaccacgaaagcgaaggcttttacgtggtggatcatcactcgtacttctgctttgggggcgaattgtgccacgccccgccgaaattgataactcgtcgcctggatacaggcgaagaatacggaaaaaccaagctgtctaacatcgtgattggcgagtggtcttgcaccctgtcgcaggaatcttggtcacagaccaaattgcatgataaacgccgtcgcgattttggagaagcccagctgaaccagtacctgaactattgtgggggatgttttttttggacgtacaaatttctgcatggcaaaggaggtgattgggacttccgtagcgtagtggaagataaggtcattaattacccgccaccgccgccaaccgaaaataaagcgatgccggcgcttttagagcagagtcgtgaccaaaactttggtggccattgctactactgggatcagaaacagcacgaccatccgtacgagcatgatctgtatgtgaaaggctggaatcaggcatgggaagactatattgaatttctccagcacggcgcaatgatcggttttccgcgtgcatggacccagaaacgtatgaccagcatttcaagtgcgtcggcgtgggagtatcgcgatggaatgaacgcggcatggctgcatctggaacgcatgggatttttgaatccgtttcgtcacccgtga

SEQ ID NO: 715 - DNA, 2235 bp, Artificial Sequence
  6xHis UPI000161BD2B
atgcatcatcatcatcaccatgaaaacctctatttccaaggtagcatgcgttacagcacagtaggtaatggtacgaccagctcggcatgggcgtcggcctatgcacgagcgcgcgacgtcgttgctcagctgaccctggaagaaaagagcaatctaacacatggtgtgtctggtccgtgtgtgggtcaaacgggtgccgtccctcgtttgcagatccctgaattatgctttgcggatgcgccggcgggtgttcgcggacaagagtttgtgtcggcatttccggcaggcattcatctcggtgcgacctttgatcggggcctgatgttaaaatatggtcaagccttaggcaaggagtaccgcggcaaagggatccacgttgcgttaggtccttttattggcccaattggacgtattgtaaggggcggccgtaactgggaaggtttgggttctgatccatatctgaatggcattgggggcggtgccatcacgaaaggcatccaagaaaaaggtgtcattgcgaccccgaaacattggatcgctcaggaacaggaatatcgacgccgcccgggtgaagaaggagaagccgtgtcttcaaatgtggatgatcgcaccctgcatgagttgtatgcgtggccatttggcgatgccctgtcagcgggagcaggctctatcatgtgcagttaccaacgcatcaataactcatacggctgccaaaactctaaaatcctcaacggtattttgaaagaagaaatgggcttcgagggctttgttgtaagcgattgggatgcgcagcatgccggtgtagcgtcagctaacgccggtttagatgtcgtgatgcctgtaccgaagttttgggggggaaatctgacagatagtgttaaaaacggatcagtaacgaccgaacgtttggatgacatgaacgcacgtctgctggccgcatggttctatctgaaccaggatgaagggtttcccgaaaatgcggtttatccatacaatgtcaaacacgagatcgtggatgtccgtgaggatcacggcagtttaattcgcgaaataggcgccgctggaaccgtgttagtgaaaaacgtgaataacactctgcccctgaaacaccctcgctttttgaacatttatggctacgatgccgaagtgaaggcgcagccgtggaacaacaatgcccgttttggtggcggatacgaagaaaatttcggctggtcaacgcttaatggcaccctgattactgccggaggttcgggctcaagcactcctccatacgtgattagcccttttaaagccattcaggaccgtattattgcggaccgtggcacactgcgatgggacttctttggtgtgaatccgaccgtctatgccaatgcggaagcgtgcctagtgtttattaatacctatgcatcggagtcatttgaccgcacctctctaaccgacgagttcagcgacacgctggtgaacaatgttgcgacgaattgttcaaataccatcgtagtaatccattccgccggtgtgcgcaccgtagatgcgtggatagatcatcctaacgtgaccgccgttcttttcgcgggcgtgccgggccaagagagtggacatgcgatagcggatgtgctttatggcgatctcaacccgtcaggccgcctaccgtatacagtggcccgtaaggaatcggattatgggcatttactgaatagcacgtttgaaccagaaattccggccttcctgcagagcaattttaccgaaggcctgtacattgactaccgccattttgatgcccagaatatcaccccgcagtatgaatttggctatggtctgtcttacacgactttcagctatgccgatcttattgtggagcctgtgagtaatggaagtctgtcagcctaccctagcccgtcagtaccgatagtacaggggggacacccggaattgtgggaaaccgtgtaccgtgcgaccgtaaacattactaacacagggaaagtcgcggggcatgaggtagcgcaattgtatttgggggtcccgaatagcccgaaaaaacagttacgtggtttcgaacgtgtgggcctgctgcagccgggtgagtccgtagaagtagagtttctcctacaccgccgggacctgtcgatttggaatgtagtgagccagaattgggagctgcagaagggtacttatccggtatggttaggtgcgagcagccgcgatgtacgacaggaaagcgagattgtagttcaatga

SEQ ID NO: 716 - DNA, 2493 bp, Artificial Sequence
  6xHis UPI00003806C8
atgcatcaccaccaccatcatgagaatttatacttccaaggcagcatggaacgtcgtaccgcccgccaccgtccacagcgcctgcgccatagcataagcccgtctcattggcctggatccaagctggagcatcgtcctacagcgacgctaggcactgtcacctcaacggaggcccgagcgaaattcaatctgactggcgggccaggcaaagatcacccgcgttacgccggtctgaccctgtggagcccgaacattaacatcttccgtgacccgagatggggacgcggcatggaaacctacggagaagatccgtacctgaccagtcaactggctgtgagtttcattcgaggtcttcagggcaacatccctgatcatcctcggacaattgcgacccccaaacattttgcggttcatagtggtccagaacctggtcgtcactcttttgatgtcgatgtgtctgcgtatgatcttgaagccacctatacgcccgcgtttcgagctgctattgtggatgggcatgcgggatcggtgatgtgcgcgtacaacgccctgcatggcaccccggcatgcgcgagcgattggttactgaacactcgtctgcggaatgactggggcttcaacggctttgtggttagcgattgtgacgccattgaagatatgacgcgctttcatttcttccgtcaggataacgcatccgcttctgccgccgcactgaaatcgggggacgatctgaattgcggcaatacctatcgcgaccttaatcaggccattgcgcgtggcgacattgatgaaagcacgttagaccaagcactgatccgcctgttcactgctcgccagcgtttaggaacgctccagcctagggagcacgatccatatgccgctattggtattaagcatattgacaccccggcccatcgtgcgctggcattacaggcagcggcgcagagcctggtcctgctaaaaaacagtgggaataccctgccgctgacaccgggcactacccttgcggtgttaggtccggatgcggacagcttaaccgcgctagaggcaaactaccaggggaccagctcaacaccagtaacccctctaatcggcttgcgtacgcgttttggtaccgcgaaagttcattacgctcagggtgcgtctctcgccccaggggtaccgagtaccattaccgaaacggccctgagaaatcacggacatcctggtctgaagggtgaatatttcgacactatcgacttctctggtccgcctcatcttgttcgccaggacagaattatcgcctttaattgggaccatgtagctccggccccgggaatgaatccgcatcgctatgcagttcgctggaccggcgagctgttacctccgggtccgggtacctacacctttgcggtacacgtggcacgctgctttgattgtaatgggcacgatccggttcgtttgtacattgacgaccgccagattatccccgacaatgccaccgcagcccaggccaccaccgccccgcaacagacggataacacacacctcgaagctactctgcactttacggatacgcgtccgcaccacattcgcctggatatggaacatcgcggtgaagatcaaggagtacgcttagaatggttggcgccggaggccccgcagctggcagaggccgagcgcgcagtggcgcacgcggatgctattgttgcttttgttggcctctcgccagaagtagagggcgaagaacttcatattgatacccccggttttagcggtggcgatcgcacgaccatcgatctcccagccacccaggagactctgctgcaacatgtgaaaacgactggcaaacctctgattgtcgttctgatgtctggtagcgcagtagcgttaaattgggcgcagcatcatgccgatgcaattttggcggcctggtatccgggccaatccggtggcacggcgattgcacaggccttggccggcgatgtaaatcctggtggccgcttgccggtcacgttttaccggtcgactcaagacttaccgccatacattagctacgacatgaccggccgcacataccgctacttcaagggacagccgttatatccttttggctacggcctgagctatacacaatttgcttatgaagcgccgcagctttctactgcaaccctgaaagccggtgatactctcacggtgactgcccatgtgcgtaatacggggacccgtgcaggcgacgaggtggtgcaactatatttagaacctccgcacagcccacaggcgcctcttcgtaatctggtgggatttaaacgtgttacgctgcgacccggggagtcgcggctcctgacgtttacacttgacgcccgtcagctgtcgtcggttcagcagaccggacagcgaagcgtggaggctggccattaccacctgttcgtaggtggaggccagccgaatacaggggcgccgggtggcaccgcggcgttcagtattatcggtcgcgcgttacttccgaaatga

SEQ ID NO: 717 - DNA, 2544 bp, Artificial Sequence
  6xHis UPI000006A330
atgcaccaccaccatcaccatgaaaacctctatttccaagggagtatgatggaacacgatgtcgaagacctcatcaatcagctggatatctcagagaaagcaatgctgctatcaggtactgatctctggcatacggcggcaatccctcgtctgaatattccctcgattcgtttgagcgatggaccaaacggaattcgcggaacttcgttttttaacagctcgccatccgcgtgctttccgtgtggcactgccctcggcgcaacctttgataagaaattactgtttgaagtgggcgaatacctggcggaagaagcgaaagcgaaaggcgtgagtgttgtgctgggccctacggtgaacatccatcgtggtccgcttaatggacgtgggtttgagtcgtttagcgaagattcgaccctctcaggtctggcagcgtcgtatgtgattctgggcttgcagagtaaaaatgttcaggcgtgcatcaaacatttcgtatgcaacgatatggaagatgaacgtaacagcgtaagcattgatgtctcacaacgcgctctgcgcgaagtctatcttatgccttttcaactggcgtgcaaatattctaacttcaaaagcttaatgaccagctataacaaggttaacggcgaacatgtatcgcagagccgtatcttgttagataacatcctgcgcaaagagtgggagtggaaggggacgattatttccgactggtttggcacctattctctgaagaaagcgatcgatgcaggcttggatttagaaatgcccggcaaaccccgtttccggaacgttaacactatccagcacttggtgggatctaaagagttgtccgaatcgatactggatgagagggcgaagaatgttcttaaactcgttaaacacagctggcaaaacaccgaagccgagaatcattgcgaactgaacaatgactcatcctgtcttcgtgaagccctgaaaaagtttgcgagtcagtcaatcgtgttgctgaagaataaaaaaaaactgctgcctctgagccgtaaaggtacttttgcagtgataggcccgaatgcgaaagtgtgcaattatagcgggggaggttcggcgaacctgaaaccttattacaccgtttcgatgtacgatggtattgcagcgaaaattgatggggtaccggaatacgccctgggctgtcataactacctgaacctgccaaatattgcgaatttgctggttaatccgcgcaccggcaagcatggctacgtcgcgaaattctacctggagccagcgaccagcgaaaaccgcaccctcattgatgactatgatcttgaagacggtgtggtacgcttttatgattactgtaacgataagatgaaggatggctatttttacattgatattgagggctacctgattcctgacgaagatgcagtgtatgagttcggcatcagcgtttttggcaccgcgctgctgttcatcgacgacgtcctgctgattgacaacaagacaaagcagaccccgaccaatcataccttcgaattcggtacgatcgaagaacgtaattcaatttatctcaaaaagggccgcaaatataatgtgcgagtagaatacggaagcgcggcgacttacacacttagcacgaatctgagtccgtcgaccggcgggcgttattcgatcggttgcgtgaaagttattgatccggagaccgaaattgactatgcggtgcgtgttgcgaaatccgttgattgtgtcattctgtgcgttggcctgaccgccgaatgggagactgagggagaggatcgcaagacgatgacgcttccgagtctgtctgataaattagtctacagcattctccaatcgaatcctaatacggtggtagttacccagtcgggcactccgattgaaatgccttggataagtgaagctcatacgttactgcatatttggtataatggcaacgaactagggaacgccctcgcgaatattattttcggcgagcagaatccctgcggcaagttaccaattaccttccctaaaaagctgaaagacaatccggcgtatctgtcgttccggtcgtcgcgtggccattgtgtttatggcgaagacgtgtttgtgggttacaagtactatgaggcggtcgagcgagaggtgcttttcccatttggttatggtctgtcatacaccacctttgaattaagcaatctgtatctgaaaaattgtggggaacgtctgcgcatcgatctggaaatctccaacactggcccgatgtcaggggcggagataatccaggtttatattagccaaattgttcgcagtgtgaaccgtccggtgaaagaactgaaagagtttagtaaagtagtgctctgcccgaaagaaaccaaactgattcgcatcgaactggacattaaatatgccacgtctttctatgacgaattgaacgaaaaatggtgttctgaggaaggtgaatacaatgttctggtgggcacgtcgagcaaagatatagcgctgacaggcaaatttacactgcctaagaccattcattggacgggcttatga

SEQ ID NO: 718 - DNA, 2268 bp, Artificial Sequence
  6xHis UPI000337E887
atgcatcaccaccaccatcacgaaaacttgtattttcaaggctcaatgcgcaagtccttcctctttattttagtgtttatcttgttcaacaccttgttgtttggccagaaacagacctataaattccagaaaaccaacctcagttttgaggagcgctcagttgatttagttagtcagctaacactggaagagaaagttgcgcagatgatgaacactgctcctgcgataccccgcctgggcattccggcgtacaattggtggaatgaagtgctgcatggagtagcccgcacgtcctaccatgtgaccgtttatccgcaagcgatcgcgatggccgcaacatttgacccggatgcacttaaccgtatggcagattactcggctctggagggtcgtgcaatctataacgatgcgattgcgtccggaaaagcaggagagcggtacgtcggattaacttactggaccccgaacattaacattttccgggacccgcgctggggtcgtggccaagaaacgtatggagaagacccgtacctgacagggacgctaggtaaatcattcgtgaagggcctgcagggtgatgatcctaagtatcttaaagcggctgcctgtgcgaaacactacgcagttcatagtggcccggaaagcctgcggcatgtatttgacgtgtcacctagcgactacgacctgtgggacacctatctcccggcgttcaaggaacttgtggtaaatgcctctgtagcaggtgtgatgtgtgcctacaacgccttcaaagggcagccgtgctgcggctcggaccaactgatgatggatattctgcgtaatcagtggaaatttaaaggctatgtgacgtccgattgttgggccattgacgatttctttaagaaccataaaacccacccagacgccgcctctgcaagtgcagatgcagtttttcatggcacggatattgactgtggcacctctgcttatctggccttagtcgacgcagtcaaacagggtatcattaccgaaagccagattgacgtgagcgtgcgtcgcctgtttatgatccgctttcgtctcggaatgttcgacccggttgcaatggtgcaatacgcccagacccctaagtcggtcattgaaagcgaagatcaccaggcccatgccctgaaaatggcgcaggaatctattgtcctactgaaaaacgagaataacacgctgcctctgagcaaaaatatcaagaaaattgcagtgttaggcccaaacgcagataatagcatcagcattttaggcaactacaatggaacgccgagcaacatagtgaccgcactgaagggtataaaagaaaaagtgggcaaccaggtggaagttacgtatgaggccgcaatcaactttaccaacgattttgaaggtgaaggcaaggattcatcgggagttggctcgaatgaaaaagcccatttcgccgcgctcgtaaaccgcgtcaaagatgcagatgttattgtctttgtgggcggtatttctccgcagctggagggcgaagagatgaaagtggattatgaaggttttaatgggggagatcgcacatcaattcaactgccgcgcgtgcagacccgcttgatgaaagccttgcaggaaactggcaaaccagtggtgtttgtcatgatgactggcagcgcaattgccattccctgggaagcggagcatattccagcgatcgtgaatgcgtggtatggcggtcagagcgccgggactgccattgcgaacgttttatttggtgactacaacccgagcggtcgcctcccggtgacgttttacaaagcggacgcagacctgccggcctttgagaattattctatggataaccgcacgtatcgctatttcaagggaaaggcgctgtatccctttggatatgggttgagctacacgacgtttgcatacacctggaagcagcagccggcgaagaaggagtacaaggggaaggacaagatatcgtgtacaatcaagattagtaataccggtctaatggatggttcagaagtagttcaagcgtatatcgagtacccacaaacgaacactgtcttgccgctaaaggaattgcgccaatttgatcatgtcttcattaacaaggcgggcagcaaagaactgaatattgaaatcccggtagaagcccttaaaaaatggagcacggaaaagaaagagctccgtctggtgcccggtgattaccatcttattattggtagccactcaagcgataagaaactcagctttgctttcaaactcatcgaatga

SEQ ID NO: 719 - DNA, 2598 bp, Artificial Sequence
  6xHis UPI0003885717
atgcatcaccaccaccaccatgaaaatctgtactttcagggctccatgacagccgcacctagtgacaaagaactgctggcattgttgagtcaactgacaactgcagagaaggtcctacttttaagtggcaaatctacctgggagacaccggagattgaacgtttacatgtcccgagcttaaaagttagcgatggccctaatggggcacgtggcgcgcagtttacagatggtactacggcagcatgcttccccgcgtgcgttagcctggcagcgacctttaaccgatcgttggcccgccaaatcggtgtggccttgggggaagaaacccaaactaagggcgcatacgtgttactgggcccaacggtgtgtccgcatcgatcaccgttaggtggacgcaattttgagtcgttcagtgaagatccgtttctgaccggtgaattagccagcgaatacgtggtgggcttacagtcccagcgagtggcggcaactgttaaacattttgcgatcaatgagcaggatacccgccgtttcaccgtgaacgagactgtgagtgagcgtgcgatgcgtgaaatttatctccgcccttttgaaattgtggtaaaaaaagcggacccgtggtgcattatgacctcatatcccaaagtgaatggtgcctatgtggacgaccaaaccacctttctgaaagatattctccgcgacgaatggaagttcaaagggctcgtgatgactgactggggagccgcctctgcggcgatagccaatggcattcgaaatgggctggatctggagatgccgggcccacctcatcggcgtcagcctgcggtcgtacataaactgatcgaagatggcaaagtcgatgttaaagatatagatgaccgtgttctgccgctgctgaaactactgcgtcagacgggtaaattcacagatcgtcgagaaccggtccctgaacgcgcaatcagcaggccggagcacgaaaaacttatccgcgaagctggcggcgaaggagtagtgctacttaaaaattcggatggcgctctgccgttaaagcccagccatttacagaacattgcggtgttaggcccgcttgcgaaacacgcagcggcccatggcgggggcagtgcgagcctgaactgtcactataagatcagccctttcgatgcgattaagagtcgcctcccggacagcaagttaagctattctaaaggcgcacacgtgttccgcgcatacccagattttgtggcgggaacgcgtaatcgcttgggaaatcctggcttcgcagcggatttctacgagaaccttaatttaacgggggaacccttctataccgaggagtatccgcgtggcagctttatgactctgatgaatgaaaacgtcgttaccgctaaaagcgcgcgcctgagtacggcgtatagcccgaacgtctctggcaaacactacttgtcattttccggaatgggtcccgcccggttatttataaacggggaattccagggagaaataaaggagacagcagaggcaatgtcgtttctgctgggtgtccaggaggagcgtcatctgcagtatgattttgttaccggcaaaacgtacgatattgtgattgagagcactatcagcccgaatcctaacgctgagttgtacctggccgatgatcagattgcagtgcatttagggtttgtgtcccagcaggagatggatgcagatgtgctgtcagaggccgtctcatttgcgaaagacgcggatgtagccctgattttcgttggaaacaccccccagtgggaaacagaagggcaggatatggcgacgatgactctgcctgcggatggcagccaggacaaattaatagccgaagtagcgaaagtcaatccaaacaccatcgtgattattacgacgggggtgccggtggaactgccctggctggaaaatgtggcggcggtggtgcaggcgtggtatggtggccaggaaaccgggaatagcattctggatgttttgttaggcgaagtcaaccctagcggccgtttacctatgagctggccgaagaaaaacgaacataccgcctgttacggtcatttcggtcttgattcgtgggattcacgggaagttgaatatgtggaaggggtgaacgttggttaccgtcactttgattcacagtatggcacagagcaggaagtgatgtttccctttggctacggtctgtcttactctaccttcgagcacagcgcgtgcgctctgagcggcacactggatgcgaatgatgaaaatgccaaaattaccgtcgccgtaactgttcacaatacgagtgatgtggccggatcagaagtggtgcaagtgtacgtaactcccccgaaaagtcgtaccggcgtggaacgtccgccgaaagcgctggtagcgtttgaaaagattcaccttaacccgggtgcccaaaaggatattcagcttaccttcaaacgggatggcgccgccttttggtcagaagcccgcaaactctgggaggttgaagccggtgaacatgaagtgcatgtgagcacgtcatcaagtccacaagatattaaaagcaccctggtgctgggaattaccaaaggcttcaccttccacccgtga

SEQ ID NO: 720 - DNA, 1725 bp, Artificial Sequence
  6xHis UPI0003C9E340
atgcatcaccatcaccaccacgaaaacctttactttcaaggcagcatgaccatttacgatcaacttcgtcaaccccctttcaacttagatgacgccgcaattgattgggttcgcgatacttacgcatcactggatctggacgataaagtgggtcagctatttacgctcattatgatgggcacagatgaaacggaatttgaccgcattgcgtctctgcgtcccggcggtgtgacccgattcttcaccccggacctggactttgagcgccgcaccatttcaaatcttgtggctcgttcgaaagtagccccggtgatttccgcagatttagaaggttcccgtcattcattcgcattcggtactccggtactgggacagttaggcctggcagcggtggacgacgtggaagctacccagatgtctagcgaaattttagcacgtgaaggccgtgcaatgggggtgcgttggtcctttacgccggtaattgatattaacgccgcgtttcgctcgcccatcgttggaacccgcagttatggttcggatgtggaacgtatagaacgtcacgcagtggctcatgtacgaggtcttcagcagaatggtatcgcggccactgcaaaacattggccaggtgaagggtacgatgatcgtgatcaacatctcgttacaaccactaatccgctctcgatggatgaatggatgcgcaccttcggccgtctctataaaaccctaattgcagagggcgtagtttctgtgatgtccgcgcacatttccctgccggcatacgtgcgttctaaaatgccggatgcaggcctagaagcctttcgtcccgccagcgtgtccaagcatctgaacttggatctgttacgtggcgaactgggcttcaatggcattattgtatctgacgcgaccccaatgggaggcctgtcgtcatggggtcatcatattgacaccatgccagacctcattgcgaacggctgcgatatgatcctttttagcgatgcacctgaagaggacatggccgcggtaaaagcggccgttgaaacgggccgcatctctgaagagcgatttcaggagtcagtgctgcggattctggcccttaaagcttaccttaaactgtttcagccgacggatgtactgccggacgccgaagaagcccgtcgtgttttagcccatcctgatagtgttgcagcgagcaaaacttatatcgcccgttcccctacactggttaaagatgtggacggcatctttcctctggacccgagtaaaactaaacgcatcctgtttgtggatggcggcatcaaccaccctctgattccgcagccccttcagtttgtcgtgcctgatctcctgcgcaaagaagggtttgaagtgacgctggatcgccctgatattgtaccgggaccagacgattttgacctcgtgctttatgcactgggagatgaaagtctgctggtgcgaggccgtatcttcgttgactggcatcgcatgggtggtggcggcttgttcaaagcgatgtatcggccgtggaccaacatcccgagtgtgatgatcagctttggtcacccgtaccatctgtatgacgcacctcgtgtgcctgcttatatcaacgcctatagcacgatggatagcgtacaggaagcagtggtcgattgcatgctgggtcgtaaaccgtttgctggcaccaacccagtagatccgttttgtggcctggaagatgcacgctactga

SEQ ID NO: 721 - DNA, 1533 bp, Artificial Sequence
  6xHis UPI0003E06A61
atgcatcatcaccatcaccacgaaaacttatactttcagggctcgatggtggcatttaatgaaattgcgggcatacctgcgaccgcgaaccgttggttacttggcgaagttctgcggggggaatgggattaccgcggactggttgtaagcgattatacgggtgacctggaattaattggtcacggctttgcaagcgatgcaagagaggcaacccgtttggcgtttttagctggcgttgacatctcgatgcagagcggtttatatctccaacatctgccggcattagtagcggcgggtgaagtcactatggcacaactggatgcgtcagtgcgccgtgtattgcagtttaaggcggagctgggattgttcgacaatccgttcttacgcattgttcctgcgcgtgcgcaggcccgtcaacgtcgccctgattcattagcattagctcgcgaagcggcacgcaagtcgattgttttgttaaaaaacgacggagagcttctgcccctgaaaacccagggccaacgtattgcgcttattggtcctatggcgcgtaattggaccgactcggcgggcccgtggactctgtttggcggggatgattcgggaaatgatcttgctacggcggtccgtgcccgcttaggtaatccgagtagcctccaagtagtagaaggctgtgattttgaacatggcttgcctggtggtgttcaggcagcagtgaccgcggcggcgtcagccgatgttgcggttttagcgattggcgaaccaatgcgttacagtggcgaagctcagtcgcgttcagaaattgttattccggcagtgcagcaagcgttgttagctgcggttgcggcaaccggcactccggttgtagtggtgttatctaatggccgagctttagttatcgatggtccggtcttgaaagctcctgccattctagttggttggtttttgggtagcgcctcaggagcggcgttagcggatatcctctttggtgcgcatggcccaagcggtcgtttacccgtgtccttcccacataccgcaggtcaggtcccgtattcctacgcacataaaccgtcaggtcgtgcagatccacgcccggacgcgttacaaccgtttaaaacccgctatcgtacggcacccaatgcagcactattcccttttggccacggcttaacctacggccgcattgaatacggcgaactgcgcttatcagatgcacgaatggctgccgcaggctcattacgtattagtgctcgcattcacaatcgtggtacccgcgacgccgaagaggtggctcaactgtatatccgtgatagatctgcgtcaattacccgtccggtgcgagaactgaaagactttcgtaaactggcggttccggctggagggtcggcggtggtcgaatttgtgttacagcgagccgatctgctttttgtaggtcagacccttgccccgacggtagaacccggagttttcgacgtctgggttgcaccctcagcagaagcggaaggtgtgtcagcgtcattcgaactgatgggctga

SEQ ID NO: 722 - DNA, 2508 bp, Artificial Sequence
  6xHis UPI00021EC697
atgcatcaccatcatcatcacgaaaacctgtattttcagggtagcatggatgtacaggcaacgctgaaaaccctgagtctccaagagaaagtgcgtttgctgagtggcaccccggacgattttgtgtcaattgccggtattccggaaaaaggcattgcaccattaaaaacagcggactccatctcgggtatccggccgtcggagtttaattcgaccctgactacagcttgtttcccgaacacggcgtgcattgcgtcaacatggaacacggaactgctagaaaagatgggcgcagaactgacccgccaggccaaaatcaagcacgcccagatgatcctaggtccaaccattaacattcagcgtgacccgcgcgctggtcgtaattttgaatgcttctccgaagatccgctgctgagcggctttatggccgctgcgatcgtcaacgggattcagagcaaaggatatggtgcatgtgcaaagcatttcgtgtgcaacgatagcgaaacccagcgtcgctattataacgtggacgaatctccaaacggtcgtgccctgcgcgaaatttatctggccgcgtggagctttctgctgcgtaaaagcaacccggctggcgtgatgaccgcctacaataaagtgaatggcgccttctgttgtgattcggaaacgttgatagaggatatcttacgcaaagaatgggggtataagggtattgtgatgtccgactggttcggcacccgttctactgtggccgcaatgaaagccggtgtggatgtggagatgcctgttcctgtttttcgcggggaacgcctgataaaagcggtgacgagcggcgaaattagcgaagaggtcattgatgcgagtgtgtcccgcttacttgacctgcgcaaccgtacacaggcggcgcagagcgaaggacccgaaaaatcggaaattattcaggaaaccaatgatatcgcccgaaaactggcgcaagagggcatcgtcctgttaaaaaacgaaaatcagactctaccactgccagcagcgacgggcttgcgtattggtgttgtcggtgaatatgctaaaaaagccgtgtttactggtggcggttctgctagctgcaacccgcagtatcgccaagttccgctggacttgttgcgcgaagcattgagcaacgaacacacggtttcatacgcgtcgggcgtgcgcatgcgtcgcatcattccgacagtcccaaccgagattgtgaccaccgacaaagggaaaaaaggcgtggaagtgacgtatcataattcagggcaggatgagccggtcttggtggaaacgctggaagatgccgcgataaacctgatggcacagggtaaaccagggctcaaaaccccgggctctcatgtcaaaatgaccacgaacctggtcccggaaacgaccggtacgcataccttagctgtgcgtcacagcggtagctttaccgtagaggttaatggcatttgtgtactcaagggaggagcgccggatataaccaccgagcagtttctgttcaacttaatcaaactggaatcgcgtattgagctgccgatggaagcgggtaaatcttaccatatttcggtgactatgcaatctcgtgaatcagtggttggcgaaccgacgccgtacggtcttacgctgagcttcgaggaagaatatagtgaagaacaggccatcctggacgcaatcgaagttgcaaaaacctcagatattacaatcatttacgcgggacgaagtgaacaatatgaaagtgaaggtttcgatctggatgaaattaccttacctgcgaaccaggtcgccatgattaaagcggttgctgcggcttcgaagaagacggcagtattgttacactgcgggaatccaatcgacattagctctttcgtcgatgacgtcgatgccgtggtgaacatgcattttccgggtcaggaaggtccgcaggctatggtcgatattctgaccggcaaagttaatccgtcgggtcgattgacggcgacatggtttaaaacgctgcaggattggccttctttcggcaactttccggcccagaaagacgaaggtgggggctttaccatcaaatacgttgaaggtctggaaatcggctaccgcggccgtgtaccagaatcacgcgtgcagttcccgtttggccacgggttgtcgtacacaagcttttcttatgatggtcttaatgcccggttagacgcatccagcaactccagcattctaaccatttcagtgtccgtgactaacaccggtagcatcgcgggcaaggaagtggtccaggtctacatttgccctccgcagaacggggctgattggcgccctacacgcgaacttaagggttttacaaaagttcaactgtcacccggtgaaacgcgcgaagtcttcgtacaaattgaagtggatacctttaacagccattggagcgaagatagtcatgcatgggccgtggatgaaggtgagtatggtgtggaagtgggcgatcagagggcaactctgatgatttga

SEQ ID NO: 723 - DNA, 1392 bp, Artificial Sequence
  6xHis UPI00001108D0
atgcatcatcaccatcatcatgagaatctgtatttccagggctccatgacaatttttcagttcccgcaggattttatgtggggtaccgcgaccgccgcctatcagattgaaggcgcatatcaggaggatggacgcggcctgtcaatttgggatacctttgcacacactccgggcaaagttttcaatggcgacaacggcaacgtggcgtgtgacagctatcatcggtatgaagaagacattcgccttatgaaagaactggggatccgcacgtatcgctttagcgtatcatggccacgtattttccctaacggcgatggggaagtcaaccaggaaggactggattattaccatcgcgtggttgatctgctgaatgataacggcatcgaacccttttgtactctataccactgggatctgcctcaagcgctacaggatgcgggtggttggggtaatcgtcgcaccatccaggcatttgtgcagtttgccgaaacgatgtttcgtgagtttcacggcaaaattcagcattggcttacgtttaatgaaccttggtgcatcgcgttcctctcaaatatgttaggagtgcatgcgccagggcttaccaatctccagaccgcgattgatgtcggccaccacctgttagtggcgcacggtttaagcgtgcgtcgttttagagaattaggtacttctggccaaattggaatcgcgccaaatgtgagttgggcggtcccttatagcaccagtgaggaagataaagcggcatgtgcccgtacgatttcgctgcacagcgattggtttctgcagcccatttatcagggctcataccctcaatttctcgtggattggttcgcagaacagggtgccaccgttccgatccaagatggcgatatggacattattggcgaaccgatcgatatgattggcattaactactattccatgagcgtgaaccgcttcaacccggaagcgggcttcctacaaagtgaagaaattaacatgggtctgccggtaaccgatattggttggccggtagaatcccgcggtttatacgaggtgctacattacctgcaaaagtacggcaacatcgacatatacatcacggagaatggcgcgtgcattaatgatgaggttgtgaacggtaaagtgcaggatgaccgtcgtatctcatatatgcagcaacacctggtgcaggtgcaccgtacaatccatgatggcctgcatgtaaaaggctatatggcgtggtcgcttctggataattttgagtgggccgagggctataatatgcgctttggcatgattcacgtcgatttccgcacccaggtgcgaacaccgaaagagagctattattggtaccgtaacgtcgttagcaataattggctggaaacccgtcgttga

SEQ ID NO: 724 - DNA, 2583 bp, Artificial Sequence
  6xHis UPI0001BE5ADA
atgcaccaccatcaccatcacgagaacctgtacttccagggttcgatgagcaaatttgacgtggaacagctgcttagtgaactgaaccaggatgaaaaaattagtcttctgagcgccgtggacttttggcatactaaaaaaatcgaacgcctgggtattccggccgtacgcgtctctgatggccctaacggtattcgtggcaccaagttcttcgatggcgtgccttctggttgcttcccgaacggtacaggactagcgtccacgtttgatcgcgacttgctggaaaccgcaggcaaactgatggcaaaagaaagtattgccaaaaatgcggccgttattctgggcccgaccaccaatatgcagcgtggtccccttggtggccgtggctttgaaagcttctccgaagatccttacctggctggcatggccaccagttctgtagtgaaaggtatgcagggcgaaggcatcgcagccaccgtgaaacattttgtttgcaatgacctggaagatcaacgctttagcagcaactcaatcgtgagcgaacgtgcactgcgcgagatttacctggagcctttccgtcttgccgtaaagcacgctaatccggtgtgcattatgacggcgtataacaaggtgaatggggagcactgctcacagagtaaaaagcttctgattgatattctgcgtgatgaatggaaatgggatggcatgctgatgtccgactggttcggcacgtacactacagccgcagcaatcaaaaacggcctggacattgaatttcctggtccgacccgctggcgcacccgtgcgcttgtaagtcacagtctgaacagtcgcgaacagattaccaccgaagacgttgacgatcgtgtccgtcaggtgctcaaaatgattaagttcgtggtagataacctggagaagaccgggatcgtggaaaacggtccggaaagtaccagcaataacactaaagaaacgagcgatctactgcgcaaaatagctgcagactcgatcgtcctgttgaagaacaaaaacaacatcctgccactgaagaaagaagataacattatcgtgattgggccgaacgccaaagccaaaacgagttctggaggcggcagtgcgagcatgaatagctactatgtcgtatccccgtatgagggtattgtcaacaagttaggcaaagaagtcgactataccgtcggtgcgtatagccacaaatccattggcggcttggccgaaagctcactgatcgatgcagctaaaccggccgatgcagaaaattctggactgatcgccaagttttacagcaatcctgtagaagagcggtcggacgacgaagagccttttcatgtaaccaaagttaaccgtagtaatgtccacctgttcgactttaagcatgaaaaagtagacccgaagaatccatacttttttgttaccctgacaggtcagtacgtacctcaggaagatggcgattatattttctctttgcaggtgtacggctccggactgttctacctgaatgacgagttgatcatcgaccaaaagcacaaccaggaacgtggctcgttctgttttggcgcgggtaccaaagaacgcacgaagaaactcacattaaaaaaaggccaagtgtataacgtgcgagttgaatacggatctggccctacgagcggcctcgtgggggaattcggggccgggggctttcaggcgggcgtaattaaagcaatagacgatgatgaagaaattcgcaacgcggcggaactggcggcgaagcatgataaagcggtcctcattattgggctgaatggtgagtgggaaacggaggggtacgatcgcgaaaatatggatctgcccaaacgcacaaacgaactagtgcgcgccgtgttaaaagcaaatccgaacaccgtcattgtgaatcaaagcggcactccggtagaattcccttggttagaggatgcaaacgccctcgtgcaggcgtggtacggtggtaacgagttaggcaatgcgattgcagatgtgctgtacggtgacgtggtacctaatggtaaattgagcctgtcgtggccgttcaaactgcaagacaatccagcgttcttaaacttcaaaaccgaatttggtcgtgtgatttacggagaagatatctttgtaggttaccgatattatgagaagctccagcgcaaagtcgcctttcccttcggttacggtctgtcctatacgacctttgagttggatatttcagatttcaaggtcaccgatgataagattgcgatttccgtggatgtcaagaatactggcgataaatttgcggggagcgaagtcgttcaggtttacttcagcgcgttaaactcaaaagtgagccgccctgtcaaggaactgaagggcttcgaaaaagtgcacctggaaccaggtgaaaaaaaaacagttaacattgacttggaactcaaggatgcgatctcttattttaacgaggaactcggtaaatggcacgtcgaagccggcgaatatctggtgtcagtgggcaccagtagcgatgacatcttaagcgtgaaggagttcaaagttgaaaaagaactgtactggaaaggcctgtga

SEQ ID NO: 725 - DNA, 2628 bp, Artificial Sequence
  6xHis UPI0002C04A25
atgcaccatcatcaccatcacgaaaacctgtacttccagggtagcatgacaggcaccagcaccggggcccgacgcggcattatttgcggtgttattgacatagatgccgcactgaatgccctgagtctggcagataaatgtcgtctcgtggcaggtgaaaccaactggcgaaccaaagcctttcctgaagccggtatccctcagctgaaaatgagcgatggtccgaccggtattcgcggtgaaggccatggctcagccggcaccccaggtgtcgctgttccagcaggtattacgctgggtgcatcatgggacccggacctcctgggtgaaataggtgatcttctaggccgtgaagcggtccggaaacgtgcccatgttttgttaggtcctactgtgaacctccatcggactccgattggcggtcgcacctttgagtgctatagtgaggatccggaattgagcggagccctggccgcaagctacgtgcgcgctgttcagcgccacgatgttgcagttaccgtaaagcatttcgtgtgcaatgataccgaaattgatagaatgacggtggacgttgacgtggatgaacgccccctgcgtgagttatacctgcgcccgtttgaacgtgcggttaaagaaggaggcgcctggggcattatgacggcctataatcgcgtggcgggtgagtttgcagcgcagaaccgtcggctgttaaccgacattctgcgcggagaatgggggtttgacggctttgcagtatcggattggttcggggtgcacgagccggtaggcgccgccaacgccggtttaactttagaaatgcccgctccggtgagagtatacggcgatcgacttctagccgcgattgaagctgggagtgtgactgaggaaactgtagatggtttagtgcgcgatttactgggtgtaatgaatcgtacgaaggcggacgaacgcaattgtgatgagccagagctgagtatcgatgacccggccgaacgcgcactgactcgccgtgctgccattggcggtacggtactgcttcgcaacgaaccgatcgacagcagtggtcatccggtattaccggtggccttggatggccttgcgagcatggccgtaattggcccgaacgccgtgatcgaccgtagtatgggcggcggttcggcctcgctcaccccgttcgatcaccgcaccttattagacgccctgagcgatcgtgttggaccggataccgatgtacgctacgagccgggtgtccgtatcgatcgcttgacgcctattgtgcgttcagctagactgcgcaccccggatggcgccgatggactgcgtctggaatatgttaacggcacagattgggatgccccggctaccattgacacagtcacgtcgtcaagtatgattcgtttttttggtacgacccctgatgagattgatgcgaccgcgtttggtgcccgagtaagcggttcattcgtcccggaaatcgacggtcctcacgaaattggcgtcgtgagtactgggccggttactatgacagcacgtaccggcgatggcgatccgattgttgttgtggatgatccagacatgctgttgccacgtactagggaattttttggctatggctcggaggaatcggtggctactgtagaatgccgagccggtgaacccgtgcatctggaagttaaatggcgtacgtctgcagaaaatggtttcgccgcacttcgtatcggcgtccgccctccggagccgtctgatcttattgatcgcgcggtggcagccgcggcggaggccgatgtagcggtcgtggtagtgggtacgaacgatgaatgggagaccgaaggtttcgatcgtgaggtcatgagcctgccgggtagacaggatgagctggtcgaacgcgtggtggcggccaacccgaacactgtggtggtggttaacgcaggctcgcccgtgtccatggattgggcagcagacgatcacccgcgcccggcagcggctattgtgacatcatttttcgcgggccaagaacaagccgaagctatggttgacgtattgaccggtgtggcggatcccgcgggtcgcttgcccattacatatccgcagcgcctagcggatactccggcctttgagcatcatgaaccagtgcgtagtgccggccgtccgccgcagcagcgctatgcagaaggcttattcatcggccatcgtcattacgaggcaaacgatgtcgccccgcgcttttggcttggtcatggcttgtcgtatggtagcgtggaatggtcaactccgacggcgtctcgcacctcagatacagcagcttccttggacgattccccgatcgttgttagtttaagcttaacaaacactagcgaccgtgacgctactagtgtcgtgcagtgttatgttgcgccgattgccccgagcgttgaacgtccggtccgagaactaaaagcctgggcaaaagagagcttaccagcacaagcacgccgcgatgtaagcatcgaactaggttcaagcgccttcaggcactgggacgaagagagtggtgcttggaaagtggaaccgggagagtatgatatcgttgtggcaacgtctgccgatccggatgatgaacacgagcgtctgcgaatcactatcacctga

SEQ ID NO: 726 - DNA, 1425 bp, Artificial Sequence
  6xHis UPI0000126912
atgcaccatcatcatcatcacgaaaacttgtatttccaaggaagtatgacggatccgaacaccctggcggcgcgttttcctggcgattttctgtttggagttgcgaccgcgagcttccagattgaaggaagcactaaagccgatggccgcaaaccgtctatctgggatgccttctgtaatatgccgggccatgtttttggtcgccataatggtgatatagcgtgcgatcattataaccggtgggaagaagacctcgatttaataaaagagatgggagtggaagcgtatcgcttttcgttagcgtggccgcgtattataccggatggcttcggcccgattaatgaaaagggcctggatttttatgaccgcctggtcgatggttgcaaagcccgcggcattaaaacctatgcgaccctctaccactgggacttaccgttgacgctcatgggcgatggcggttgggcatctcgttcaactgctcatgcatttcagcggtatgcgaaaaccgttatggctcgtctgggcgatcgtctggatgccgttgcgacatttaacgaaccgtggtgcgcagtatggctgagccatctgtatggtgtacacgccccgggagaacgcaacatggaagcggcgcttgccgcgatgcatcacattaacctggcgcatggatttggcgttgaagctagtcgacatgtggcgccgaaagtgccagttggcttagtactgaatgcgcactcggccattcctgcgagtgatggggaagcagacctgaaagccgcagagcgtgccttccagtttcacaatggggcgttttttgacccggtgtttaaaggtgagtacccggccgaaatgatggaagctttaggcgatcgcatgccggtagtagaagcggaagatcttggcataatttcgcagaaactcgattggtggggcctgaattattacacccccatgcgtgtagcagatgacgcaacgcctggagtcgaattccctgctaccatgccagcccctgctgtgagcgatgttaagacagatattggatgggaggtgtatgcgcccgccttacatacgttggtggaaacactgtacgaacgctacgacctcccggaatgctacatcactgaaaacggtgcgtgctataatatgggtgtggaaaatggccaggtgaacgatcagccccgcttggattactatgcggaacacctgggtattgtggcggatctgattcgtgacggttacccgatgcgtggctatttcgcgtggagcctgatggataactttgaatgggcggaggggtatcggatgcgtttcggcctcgtgcatgtagactatcagacgcaggtgaggacggtgaaaaactcagggaagtggtacagcgctctggcgtcgggttttccgaagggcaatcatggtgttgcgaaaggctga

SEQ ID NO: 727 - DNA, 2298 bp, Artificial Sequence
  6xHis UPI000038ECF7
atgcatcaccaccatcaccatgagaatctgtactttcagggtagtatgaacaaaaagcagctgttgtggattctgtccatcggtactattgtttgcgggattagctgtaccaaaacggaaaagccagccgccgatgcgatcgaaaaaatcatatcggaaatgagcctggaagagaaagttggtcagatgacaaacttaactctggcaacgatcgccaacgaggtagatagcactgtcgtggtagatactgcgaagctgaacgacgtcatcctgaaacatcatgtgggtagcattcaaaacgtgttaacccacgcgtacaccttaaacgaatggcactctatcattgaaccgattcagaaactgaccctggaaaagacccgccacaagattcctttcctttattgtattgatgcggttcatggtgcgaactatgtttacggtgcgaccattttcccgcacaacattgggctggcggcgacgcgcaaccgtacattagtcaaagaagcaggtgcaattaccgcggttcagacgcgcgctgccggtattcgttataactttgcgccggtgcttgatgttggccgtaaccagctgtggagtcgctttggcgaaacctttggtgaagacacttatattgcgaccgaaatgggacttgcctccatccgtggcttcgaaggcggcgatgtctctagcccgctgcacgtggccgcgtgtatgaagcactttatcggctatagcgtcccgcaaaatggcaaagatcgtgcccccgcatatataccagagattatcctgcgtgaacacttcttgccatcatttaaggctgccgtgaatgagggcacgcatacgctgatggtgaattcgggcgaaatcaatggcaccccggtacacgcaagcaagtacctgttgaccgatgtcttgcgtactgagcttggttttaaaggcgtggtcattaccgattggctggatattctcaaattaaaagagcgccaccaggttgcagagacgcataaagatgcagtttatctggctgtgacggcaggcattgatatgtgcattgtcccgttcgacttttcatttactgatgatttgattgcgttggtgaaagaaggtcgtatttcagaagaacgcatcaacgagagcgtccgccgtattctccagctgaaaaaagatttaggcctgtttgaacatccgtatttggaagaacaagccgtgaaagctttttcagatcaggcctactcaaacactgcgttgcagctggcgcgcgaaagcgtgacattattgaaaaatgagaatggcattctgcctttaacggataagcagaaaattctggtgacaggtcctttcgcgaataccctgtcggaactgcatggcgcttggtcctacagttggcagggtaacattgaacgcttatatccggacaccctgaacacgattgctgaggtgttcaagaaggagacccccgcgactagcatcttcgatctgagtgcgtggaccaaaagtaacggctggaacaaaggtgcactgatcaaggcggctcgcgccgcagacgtattggtggtgtgtgccggcgaggctgcttatgccgaaacgccgggaaatattccagacttggcgtttgattcggtgcaggtggaggtaatcaaggagctgtcgaaaacgggcaaaccaattgttctcgtactgctggaaggccgtccccggattatccgcgagatcgaaccctactgtaatgccgttgttttagcttactggccgggagcacaaggcgcccaggcaatttacgacgtgctctatggacgttacaatccgtcgggtaaattaccatttacctatccgcgttatagtggcacactgctgacctatgaccataaacttttagacgaagcggttgaaatcgttgaaccgtatcagtatttctacgaatttaacccgcagtacgcttttggttatggcttaagctataccaccttctcttactccgcactgaaaattagctcggatactctggtcgccaatgactcactgaccgtcagtattacggttaccaatactggcaaactcgacggccaagaagtggttgaactgtatagtcgtgatctggttgcgagcatcaccccttcggtgaaacgcttacgacgctttgagaaaattgctctgcatgcgggcgaatcaaaaacagtggattttgtgctgaccaaagcggatctggcctttgtgggtcaggatttgaaaaccgtgaccgaacaaggtgcctttgagatcagcatccagaaacagaagaccactatttattacaaatga

SEQ ID NO: 728 - DNA, 1437 bp, Artificial Sequence
  6xHis UPI00003C5CA4
atgcatcaccaccatcaccatgaaaacctgtactttcaggggtcgatgtcaaacgatcatctgccggaattccctgccgggttttggtttggggcagcgacagcctcctatcaaatcgaaggtgcggtccacgcggatggccgaggaccgagcatttgggatacctattcacacactccgggcctggtgctgaatggtgacaccggagatgttgcgtgtgatcattaccaccgttacccggaggacgtagagctcttgcggcgcctgggtgtagatgcgtatcgtttttcgattgcgtggccgcgagtgatgcctaccggctcaggtgatgtgaatcagcgtggtttagacttctatgaccgtctggttgacgctctgcttgaagcaggcattacccctgtgccgactttgtatcattgggatcttccccaggctctggaggatgccggtggctggcgttcacgttcaactgccgaacatttcgctgcgtatacccgcgccgtggtcgctcgtcttggggatcgtattcgtcattggattactctgaatgaaccgttttgtagcgctttccttggatatgccgtaggtcgtcatgcaccgggtgcacgtgaaggcaccccggcgttagcagccgcacatcatttgttactggcacacggtctggcggtacaggaacttcgtgccgccgacgcgggcgaagttggtattacccttaatccggatcgcattctgccggcctccgattccgctgcggatcgtgcagcggcggatcgagctgaaaccttacacaaccgtgtgtggttcgacccgctgttcgcgggtcgttatccggcaaacgaagcggatgtgtggggtgaactggcagatggcagctatcgtcgtgacggagatctggaaattataggacagccgcttgattttctgggcattaattattatcgcccgttgaaagtggctgatggtcctctcactgaagcggatccagcgcgccgcaccgcagtggatatccgcgcgcaccagcaacgttttgacggcgtacgacataccgcaatggactggcccgtcgtcccggaaagctttactgacctgctgttggacctgacagagcgctatccgaatttaccgccgatttacattacggaaaacggcagtgcggaacacgatgtagtgagtcctgatggcagggttcacgataccgatcgcatcgcatacctaaacgaccatcttcacgcattagcggcggcgattcgtgcgggagtggatgttcgtggctacttcgtatggagtctgctggataactttgagtgggcgtttggctatgaacgccgctttggtattgtgcgcgtagattatgatactctggaacgtcttccaaaagactcgtatttctggtatcagcgcctgattgaacaccatcgtgctaggcaccgcggctga

SEQ ID NO: 729 - DNA, 2388 bp, Artificial Sequence
  6xHis UPI0000069E5E
atgcatcatcaccaccatcatgaaaacctctatttccagggtagcatgtcgctcaccctgttaacccgtgcttccacgtctttccaaaattggacccacgcacaccatttggcgctgacgttcgtcaaccagcttaacattaccgagaaatcgaacatcgtcacaggaacgtatcataccagcacgctggacggaaaaccaatgaattgcatcggtaatatcggcccaattccgcgtctgaactttaccggcatttgcttaaacgacggtccagccttactgctcgttcgcgatctcatttcagtgtttccaagcggtgtgacgttagccgcgacctgggaccgggaactggtgtatcaaagctataaagcgctgggtgaggagtttcgcggcaaaggcacgcacgtcgcattaggccctgtagcgggaccgttaggaagacacccactgggcggccgaaactgggaaggcttcagccccgatccgtatctgaccggccatctaatgactgcctctatcaccggcatgcaatcggtaggcgtgcagacatcgtcaaaacacttcattggcaacgaacaggaaactcagcgttccaacagcccgctgccggatggtaccaacattgacgcgattagtagcaatatcgacgaccgcaccttgcacgaattatacctgtggccgtttgcagacgccgtgcgcgccggtaccacaagcatcttgtgttcctataaccgaattaacgagacctacgcctgcgaaaacccacacttactgaacaatatcctgaaaggcgagctggggtttcagggctatgtggtcagcgattggttcgcgacccactctggctacccggccgctaacgccgggctggatatggacatgcccgggtacatatcccaaagcgccattaatactggcgaaacttattttggtccgcatttgatcagtgctatccaagctggcaacatgaccgaagatcgtttggacgatatggtcactcgcatcatgacctcttatttcctgctgaaccagtcttctaactatcccacgccggacccgagccagacttatgtcatggccaatatgtatggttatgactacggcgcacagatcccggcaagagacgtacgcgctaatcatagctctctgattcgccaaattgggtcagccggcacggtgctgttaaaaaacactaacaacatcttgccgttaagcaagccactgaatatcggagtattcggaaatagcgccccggatcccacagacggcttgacctggccgcagtccgatctgcagactggctttgacattggtactcttgatataggcggcggttcaggctccgcacgccacacaacccttattagccccctgacagcactgcgcacacgagccgctacctatgcgcgtgtgcagtacttaaccaataacgcattactgagtagctcttcatcaagttcatttgccggtatctacccgattccggaaatctgtttggttttcttaaagactttctcaagtgaaggtgtagaccgtaccagttacccgttagactggaacagtaccctggtggttaacaatgtggcctcattttgtcaaggtaacactattgtaattacgcactcgtcgggcatcaacacattgcccttcgctcaaaacccgaacgtttcggcgatcctgctagcgcattatccgggtcaggaaagcggaaacagcatcgttgatgtgctctttggtgtcgtgaacccgtcgggtaagttgccgtataccatccccgttcatgagagcgatatgcacattccggtggtgaacctcagcacctctgaagtactcgcgcaccatcaatctcaaaatgcgtggcaaagtaacttcaccgaaaaactggccatcgactatcgcggctttgaaatgaaaaacgttaccccgctgtacgaatttggccacgggctgagctatacaaccttcaacttaacaaccccaaccccgtcaatcaaacatgtaaccactcagccgattacagcacgcccgaatcccttaagtccaattctgcctggcggtaatgctgatctgtacacgcctctttttacactgactacgcgagtgaaaaatacgggcacgcgaactggggccaccattctgcagctgtatatttctttaccggaaacttcaaccccggaggggactccgaaaaaagttctgcgcggtttcgaaaaagtggaaatgcgaggcggagaagaacgcgatgtggagttcgtcttgcagcgccgtgatgtatcttactgggatacagtactgggtgattgggttgtgcccgaaggtgatattggagttatggtgggctttagcgtgcaagacctgcgtgctcgcgttggtgtggtcgttcgttga

SEQ ID NO: 730 - DNA, 2265 bp, Artificial Sequence
  6xHis UPI00033994D2
atgcatcaccatcaccaccatgagaacctgtattttcaggggtcaatgtctcagccgtacaccaatccgtcgttgagtgttgccgaacgcgtagaaaatctgctgtctcttatgagcgttgaagaaaaggtcgggcagatgctgcagttaccagctaacatgcctgagaatctcgataaattggaaagctggaacgtcggctcatatctccattgtacaggcactatggtggaagaacttcaacagcgcgcggcgaaaacacgtcttgggattcctctgatttttggcattgacgcgatccacggtcactgttttgaaaacaatggcaccgtcttcccgacccagcttgcgctgagctgtgcctggtctaaacagttgagccagtctatggcccgtatcacggcgattgagacgcgtgcttgtgggttacattggacctttagtccggtcttgtgcgtaggacgtgatagccgttggggtcgaattaatgaaacctttggcgaagacccgtggctgattggtgagttagcggctgccgcggtttatggttatcagggggacaacttagccagccatgacaccattttagcctgcgctaaacattacgtggcgtacggagaagcgacggggggacgtgatgcgtacgaagcggaggtgtctccgcgtaaattgttatccctgttcttgccaccgtttgaaaaagcggtcaaagaagcaaatgtggccacgctgatggtgggctaccaggcaatagatggcgttccctgcagcgcgaattcgtggctgttacgtgaggtgccgaagaaccagtggggtatggatggcttcattgtgactgactgggataatatcggttcgctgcacgataaacagcgggtggcagaggatttacgtcacgctgccaaaatcgccgtagagtcgggtaatgacatgattatgaccaccccgtctttctatcagcacaccattgatttagttaaagatggggagctggacattgcgttgatcgatgacgccgtgagtcgcattcttaaatacaaattcgagcttggcctgtttgaagattttcgctataccgatctgtcgaaaaaggagcagattctgggtaacgccgatcactggcaagcggccttggaagcgtcgcgccaatccctcactttgctccagaacaacggcattctgccgcttagtgacgcctctaaacccaagattttattgtgtggggccaatgcggacgatgttgtagcacagctgggcgattggtcttttggaagtatgcaagcgggggcggcagatgacagctatcatcagaaggatgcgattaccctgcgccaggggctccaggccgcagctgatgccggccgttgtgaactgagctatgttcgtggcgcggcaccggcggaggcagaatttggtgaaataagcagcgccgttaatgcggcaaacaactctgacatcattgtcgcatgcgttggggatacgctgtcacagcatggagaatttcatgaccgggccgacttagacctgagtggccagcagcaggcgatgctggaagctctgaaagccacaggcaaaccgttaatcgtcgtgttcatggcttctaagcctctgactatcggctgggttaaacagcacgcagatgccattgtgtgtgcctttaatccgggtgccaaaggcggacaggcgttatcagaactgttgtttggcgagctgaacccgagcgggaaattgaccatctcctttcctcaacacgtgggccagagcccggtttactacaacaaatatgaaggctggcatgctcgccttagcgaacgtacggataatcaggaacgatacattgatatgccgttattgcccctctttagctttggtgagggcatctcttattcagaattctcttatagcgacctcgccgtcagcaccccatgtctggccgccaacaaggatttaagtcaaggcgaagctttgaaagttagcgtcaacattagcaacatttcacagcgttccggtgtagaaatcgcgcagctatatatccacgattgtgccgcatctgtaaccgttcccgtactgcaactgcgtggttttgagcgcgtcgaactcgcgccgggcgaaactcaacgcgtggaattcagtgtgccgtttgcagatttggcgctgattaacacccaactgcagaaagtggtggagccgggtgcgtttaaagtgtttgtcggtccctcgtcgaaggccgaagatttgttaagcgccgatttcaaagtcgcgtga

SEQ ID NO: 731 - DNA, 2283 bp, Artificial Sequence
  6xHis UPI00038B7639
atgcatcatcatcaccaccacgaaaacctgtattttcagggcagcatgatcgaagagattgtaaaaaaaatgtccctgaaggaaaaaattggtcaactcaatcagcgcctgtatggttggcaggtatatcagaagaaagaaggtaaactgtacctcacggattattttaagagcgaagtggcaagattcggcagtattggatggatctacggggtcttcagagcagacccgtggagcggtaaagatgcgaccacgggcctatccgtggaagaaagccgcgaggtgtcacgtatgattcaggattatctcaaagaacacacccgtttgggcatcccggcgttcctgaccgaggaatgcccacatggtcaccagggattagctgccaccacacttccggtgaatttttcgaccggcgcctcctggaatccggacctgtatcaaagcgtgcagacttttgtagcacaagaacttcgtgcgaagggtgcccaggttggcctgatttcaacgctggacattgttcgcgatccccgctggggccgcaccgaagaatgctttagtgaggatccatatctagccagctgttttacccaggcggcagtgaaaggtatgcagggtgaaatcttaggccatgaaccgactacccacgtgttggccgtgctgaaacattttgccgcgcaaggcagttcaatgggcggacacaatgcgggtccggtcaacatcggtgagcaggaattacgtgaaatccacttaccggcgatgctggcgggaattcaggctggtgctctgggatgtatggcggcctataatgactgggacggggttccatgtcacgcgaatcctcgtctgctgcaagaaattctgcgcgaagaggcgggtttcgccggcgttgtaatggcggacggctgtgccctcgatcgccttgcagattggctgggaaacaaaccggaagctgcggcacgcgcgatgaactcaggcgtagacattagtctgtgggataacgtgtttccgcaactggaggccgccgtggatcaaggtctgatcaaacaagaaaccattgaccagagcgtgatgcgcgttctaaaactgaaggagcagcttgggttatttgatgaaccagtgcctactgtatctgtcccggatcaaaaacaatttcaggaaagcgccacccgcctggcggaagaagctatagtgttactcaagaatgaacaggtgctgcctctgaaaaaacaacgccagacgatcgcggttattggcccccatagtaaaaactcatatcaccaactgggagactataccccatttaaagaattaagcgaatgtcgcaatttgtgggaggggctgctggagatcaaaggcacggaaacaacctttattcaggccgacggttgtggcattacggaaggtacaaaagaacagttaacggctgcttgccaggccgctgcgaccgccgatcagattattctgaccattggaggctcttcaatccgcgatttttccaccgattttgacaaaaacggcgcggcgctgcaagggtcggcggaaatgacctcgggggaaaacattgatctggcgtcgctggccctgccggagtgccagaagcgtctcattactgaacttaagaaattccagaaaccgttgattggtatcgtgatcgctgggcgccctcacctgttatcggaggtgtctaccgccttcgatgccttactgttcgccggttatcctggtcagtttggcggcagcgcgcttgcccgcattttgtttggggaaaccaatccatcgggcaaactcgcagtcagcatccctgatgagaacggtcaattgccagtatattataactatcgggaagccgcattccagcgcgactataccgactgttcaggtacgccacggtacggatttgggtacggtttgagctatgccgaattcatgctcaaaggcattcatgcgcaatatgcgcctcaagcgatccagattaacggcaccattgagaatcttagcgtcatcgcgggcgcagaggttgtccaggtctatttgcgtaactatagccaacaagttctgcctcgtgtgaaagtactttgcggttttcagaaggtttttctgccggccaagagcaccgtggacttttccctgacggtttcctatgaaaccctgaaacgccttaatatctcgccgaacgaactaccggccgactttattatccaagtagaggcggcgaatcagaaacaggtattcaccaagccgctgaagcaggaagaaaatggcaaaggcgagaagagctgttga

SEQ ID NO: 732 - DNA, 1428 bp, Artificial Sequence
  6xHis UPI0003D8A7DC
atgcatcaccatcatcatcacgaaaacctctactttcagggtagcatggccttccgtgaagacttttactggggggcttcaactgcaagctaccaaattgaaggcgcatggaatgaagatggtaagggccgtagcgtgtgggatcgtatggtcaattgggatcagaaaattgccggcggcgatacgggcaattctgcctgcgaccattatcatcacctggaacaggatatttcactcatgaaagacctcgggatcaatgcctatcgcttttcacttagctggccacgcgtcctgcctagaggtaccggcgcggtggaggaacgcggtgtcgaattttatgatcgtttgattgatgcgctgctggaagccgatatcactccgtttatcacaatgttccactgggactacccgttggaactgttttatcgcggcggttggcttaacccggatagcccgaaatggtttggcgaatatgcggcactgctgagcaaacgttttagtgaccgtgtggataactggattacgctgaacgaaccgcaaatgtttactactctgggacacgatatgggtattcacgcaccgggcttgaaactcccacctgaagatatggtgcgtatcatccagcatgtattgagcgcgcacggcatggcggtcgaacagctaaaaagtaactgcgtcaacggcgccgatgcactgaatattggctgggcgcctgcggttggtggcgtagaacccgcggatgaaacagatcagcgcttagttgatgcagcccgcgaagctcagttttctttcgtggacgagccgcactttggttttggaacggcattgtggaacgacccggtattcttgggtaaatatccggatgcttacctgaaaactcacggacagcatctgccggagggctgggaagaagatttgaaacatattagcgcgccgttaggcttttgcggcctgaacgtgtatcacagctgggcccgtgcggtttatgatagccacggcgaaccggaaattcgccagaccgatgacttaggtgccggctacccacgtacccactttcaatggccagtgaccccccgtgcgttgtactgggttccgcgtttcttccacgaacgctacaatatccctgtcgttatcaccgagaacggaatgagcggtcatgattgggtacagacggatgggaaagttcacgacgcgtaccgtattgatttcacgaaacgttacctgggcagcttaaaggatgcctcggctgcaggagccgacgttcttggctattttcactggagccttatggacaactttgaatgggcggaaggttaccgtcacagattcggcctggttcatgtggatttttcggattttaaacgcacgccaaaagatagctttcattggtacagcggtgttattggcaacaacggtgccgacctctga

SEQ ID NO: 733 - DNA, 1653 bp, Artificial Sequence
  6xHis UPI0003ECF15E
atgcaccatcatcatcatcatgaaaacctatattttcaagggagcatgattatttgcatgaatgcggcgggtgaggcaggcgttggtagcgtgctcgtaagttttaacgaggttgacggtattcctgcgacggccaataaatggttaatgactgatatcctgcgcggccaatggggtttcaacggttttgttgtgactgattacactggcatctctgagatgattgatcatggaattggagaccttcagaccgtgtcagctcgcgcgattaatgctggtgtcgatatggatatggtcagcgaagggttcgtgggcaccttaaagaaaagtgtgcaggaaggaaaggtgtctatggaaacgcttaacaccgcgtgccggcgcatcctggaagcgaaatacaaattgggtctgttcgataacccctacaaatattgcgatccgaaacgtccggcgcgtgatatctttaccaaagctcatcgggatgcggcgagacgcattgcggcggagagctttgtgttgttgaagaatgatagcccggatggtaatcctaatggcaatccgctgttaccgtttaacccgaaaggcaacatcgccgttatagggccgcttgcaaattcgcgcagcaatatgccgggtacttggagtgtggcggcggttttggatcgatgcccgagcttggtggaaggcctgaaggaaatgaccgcaggcaaagccaatatcatgtacgccaaaggctcgaacctaatctctgacgcgagctatgaagagcgcgcaactatgttcggccgctctctaaaccgtgacaaccgtacggatcagcagctgttagacgaagctttgaacgtggcacgccgttcagatattattatcgccgcccttggggaaagttcagaaatgagcggggaatcgtcaagtcgcactgacctgaacattccggatgttcaacagaacctgctgaaagaattgcttaaaaccggtaaaccggtggttttggtgctctttacgggccgcccgcttacgctgaactgggagcaggaacatgtgccggcaatactgaatgtgtggtttggtggtagtgaagccgcgtatgctattggcgacgccctttttggctatgtaaacccgggcggtaagctgacaatgaccttccctaaaaacgtgggccagattccgctatattacgcccataaaaataccgggcgtccgttaaaggatggcaagtggtttgaaaaatttcgttctaattacctcgacgttgataatgatccactgtacccgttcggctacggcctgagctacacgaccttttcgtacagcgatattgacctctcccactcgtcaatggacatgaatgggagtctgactgccgcagtggaagtgacaaatacgggcacctggccgggaagcgaggtggtccagctgtatattcgtgatgtggtgggctcatcaacgcgtccggtgaaagaactgaaaggctttcagaagatttttctggaacccggcgagatgaaaatcgtgcgtttcaaaattgcccctgaaatgctgcgttattacaactacgacctgcaactggttgcggagcctggggactttgaggtaatgatcggcaccaattcccgcgacgtgaagacggcaaaatttaccctgaactga

SEQ ID NO: 734 - DNA, 2628 bp, Artificial Sequence
  6xHis UPI000430029A
atgcaccaccatcatcatcacgaaaacctgtacttccaaggtagcatggcaaacacaggtatggatcgctcctttttgactgcaagtgttgaagacttagtggatcacatgtcattagcggaaaaagtgtcgctgattgccggtgaggattggtggcgtacagttgcgctaccgcgactaaacatcccgtctgttaaagttaccgatggacctaacggcgcgcgcggccagagtttttttaagatgacgccagccgttgtgctgccgaacgcgacggcaatggcagcgaccttctcatcaacattgccaactgaagctgcacgcttacttgcagccgaaacaaaagcccgcagctctgtgtgcctacttgctcctactattaatatttgccgctcaccgctgggtggccgctcattcgaaagctttggcgaagatccgactcttagtgggatcatcgcggccgaatatattaagggcttacagtctcatggcatctcagcagccattaagcattttctcgcgaacgaccaagaacatgaacgtatgggccaagattccatcattgcccctcgtgccctgcgtcagatatatttacgtccgttccaaattgcacaggcacgtgcagccccgtggagttacatgacgtcgtacaacaagcttaacggtacccactgcgcggaacatgactggttacttaaagacttgttgcgaggcgaatggggctttgaaggcctggtgatgtccgattggatggggacctattcagttgcagaggcaatcaacgccggcttagatttggaaatgccgggcaaaccgcgttggcgccagttacagctcgttcgacattcaataaacgcgcataaaatccttccggaaactcttaatgaacgtgtcgttacattgctgcgctgggtccagaaattgagcgcgctgaatccggatattgtgtatggccgtgatgatagcattgagtggacccgtaaagagaatcaggaagaagatgctgcccttgttcgccgcatcgcaagtgaaggcattgtgcttctgaaaaatgaaacctctacgctgccgattgtaagggggaaagtagcagtgattggaccgaatgccaaaaatggagtgattacgggcggcggatccgcacgccttcgctcagcgtggcgggtaactagctggcagggtctggtggataataaaccggatgatatcgagctctcgtatacgctgggttgtaaaggcagtaagttcttaccggtcttcggagaagaattcacctctatggacggcgttacgcctggatttgatatgctgcactacgcgattgcggacggcaagcaggcaagtcagccggcagtctcggaagtttggaataactcagacattatgctggcggacttcaagcatcccgatctgggtgacgactactttaccgaaattcaagctttatttattgcgccgattaccggagactggcagttcgaagtgagcgtaacgggtcaagcgtgggtatatttggatgatgaactagtggccgatctctcgcaggaacagaaacgtacgagcagcttcttcggaaacgggggcaacggcacgattattacggtggccgttgtaaaagataaagtatataaatttcgtttactgcatgatagccgtaagccgccactagcgccgggccaggattctcagccgctgcagctgatcggcatgaaactgggtagttttcccgtcattgatgaagacaaagccatcaacgaagctgtggaactagcgaaagcgagcgacgtggcggttctggtggttggtttggaccaggattgggaaagcgaaagttatgatcgtccgaatctgtcactgccgcttcgcttaaatgatttagtccgccgcgttgcagtcgaagccccggatacaaaaaaggtagtgattctgcaaaccggttcggccgtcagcatgccgtggttggaaaacgtggactccgtgatttggccgtggtatggtggtaatgaagcggggaatgcgatagcggatgtggtttacggcaaagttaaccccagcggccgccttccgattacactgccgaaacgtgaattagatattgccgcgaatctgaacttcaaaagcgcccgtactaagacgtattatgaagaaggtatttgggtgggttaccgccattttaacgcaaggggaattgaacccgtatacccatttggccatggcttgagctatacctcctttgagtatagtgatttaatcgtgtctccatcgacctcggcaagtcctgacgaatggaaaatctcggtgagtgcaaaagtcaccaatactggttcggtcccgggagcccacagcgtgcacttttatacgaccccgccgccggcgacgagcaacagcctgacccatccggaggtgactctgcagggattcaacaaaaccgcggtgctgcttccggggggatcggaaaccgtgacagtggagatggataaatacgccatctcgcattgggacgaactaacctctgtatggcgtgctgaacccggcgagtggcacgttcaaattggtacaaacgcacagacgatgtgcgctaaggaacgtttcacagtaccacgtgattttaagtggacgggagtgtga

SEQ ID NO: 735 - DNA, 1386 bp, Artificial Sequence
  6xHis UPI0000126906
atgcatcatcatcatcaccatgagaacctgtactttcaaggctctatgaacgtaaaaaaatttccggagggctttctttggggagtggcaaccgcaagctatcagatagaagggagcccgctagccgatggcgctggtatgagcatttggcacaccttcagccataccccgggcaacgtgaaaaatggggacacgggcgatgttgcctgtgatcactataatcgctggaaggaagatatcgagattatcgaaaagttaggcgtcaaggcatatcgattttctattagttggccacgcattctgcccgaaggtaccggccgcgtgaatcagaaaggtctggacttctacaatcgcattatagatacgctgttggaaaagggcattaccccgttcgtcaccatttatcactgggatcttccgttcgctttacagctgaaaggtggttgggccaaccgcgaaattgcggattggtttgcggaatactctcgcgtcctgttcgaaaacttcggcgatcgcgtcaaaaactggataacgctgaacgaaccctgggttgtggccattgtagggcatctttatggcgttcacgcaccggggatgcgggatatttatgttgcgtttcgcgcggttcataatttgctgcgtgcacatgccagagcagtgaaagtgtttcgagaaaccgtcaaggacggcaaaattggcattgtgttcaacaacggctactttgaaccggccagcgagaaagaagaagacattcgtgcggtacgtttcatgcaccagtttaataattacccgcttttcctgaatccgatctaccgtggtgattatccggaactggtcctggaatttgcccgcgagtacctgcctgaaaattacaaggatgatatgtcggagatccaagagaagattgatttcgttggcctgaactactactcggggcatctggtgaagtttgatccggatgcgccagcaaaagtgagttttgtggagcgagatctgccgaaaacagcgatgggctgggaaatcgtgccggaaggcatttactggatccttaaaaaggtcaaagaggaatacaacccgccggaagtttacattaccgaaaacggggccgcgttcgatgatgtggtgtcagaagatggacgggtgcacgatcaaaatcgtatcgactacctgaaggcccatataggccaggcgtggaaagcgatccaggagggcgttcctttaaaaggttacttcgtctggagcctattggacaattttgagtgggcggaaggctacagtaaacgcttcggcattgtatatgttgattactccacccaaaagcgtattgtgaaggatagcggttactggtacagcaacgtggttaagaataatggcctggaagattga

SEQ ID NO: 736 - DNA, 1488 bp, Artificial Sequence
  6xHis UPI0000083EA8
atgcaccatcaccaccatcatgaaaacctgtactttcaagggtcccgccgcgatgtggcatcatcggatacggtttacacctttccggacgaattcaaactgggcgcagcgaccgcctcataccagattgaaggtgcgtgggatgaaaatggcaagggccccaacatttgggacacccttacacatgagcacccggattatgtggtagatggtgccactggtgatattgcagatgattcgtatcacctgtataaagaagacgtgaaaatcctgaaagagttgggggcgcaggtgtatcgcttctccatttcgtgggcgcgggtactgccggaaggccatgataatatcgtcaatcaggatggcattgattattataacaacctcattaacgaactgctcgctaacggtatcgaaccgatggtcaccatgtatcactgggacctgccccaagccttacaggatctgggtggttggcctaacctggtgctcgccaaatactcagaaaactatgcccgcgtgctgttcaaaaattttggtgatcgcgtgaagttgtggctgacgttcaacgaaccgcttaccttcatggatggctatgccagcgaaattggtatggccccgagcattaataccccgggcattggagactatctggcggcacacaccgtcattcatgcgcacgcccgtatctatcacctttatgatcaagaattccgggcggaacagggaggcaaagtgggcatcagcctcaatataaactggtgtgaaccggcgacgaactcagcggaggatcgtgcttcatgtgaaaactaccaacagtttaatctgggcctgtacgcgcatccgatcttcacggaagagggggactatcctgcagtactgaaagatcgggtttcacgtaatagcgcagacgagggctacacagatagccgtttgccgcagtttaccgcagaagaggtggagtatatccgtggcacgcacgatttcctcggcatcaatttttataccgcactgctgggcaaatcaggcgtggaaggttacgaaccgagccgttaccgcgactcgggcgtgattttaacccaggatgcagcatggccgattagcgcgagtagctggcttaaagttgtcccgtggggctttcgcaaagaactgaattggattaaaaacgaatacaacaacccgccggtatttatcacggaaaacggcttcagcgactatggtggcctgaatgacacaggccgagttcattattacactgaacacctcaaggaaatgttaaaggcgattcacgaggatggcgtaaacgtgattggctatacggcctggagcctgatggataactttgaatggctgcgcggctacagcgagaaattcggtatctacgcggtggattttgaagacccggcccgccctcgtattccgaaagaaagtgccaaagtcctggctgagattatgaatacccgcaagatcccggaacgctttcgagattga

SEQ ID NO: 737 - DNA, 1515 bp, Artificial Sequence
  6xHis UPI0002BF34B3
atgcaccatcatcatcatcacgaaaatttatactttcagggtagcatgttcctggccctaacgtggcctcaggcgtttgatgagtggaccctgagtgaagccattgcagccaacgcgtcatctggcggccttcagaaagtgctggaggaacactatagtacctttatcactgaagaagattttgcgcagatcgcggcggccggcttgaattgggttcgtgtcccgttgccattttgggccgtaagtaaattacctgaagaaccgtttctggaacgtgtgagttggaagtactttttaaaagcgatcgagtggtgccgcaaatatggcctgcgactgcaactggatttacataccatcccaggcagccagaatgggttcgaccatagtggcaaacgcgaaaacattaacttcctgcgtggtaacatgggcttggcaaatgctcagagagcccttaatgtcattcgtagcattaccgaatttgtgagccgcgacgaatacaaagatattgtccagatgttcggcgtcatgaacgagcctgcctctcagcgcattggtatggattcactgaccagtttctacgtggaaatgcatgatatgatgcgtaccctgacgggcgcggggaaaggcccgtggatttccttacacgatggttttgattttgcagctcatactgccgataccttcatgccgggtgctgatcgtctggccattagcgcccatctgtatttcagtttcgcgaccccgttaaaccctgcaccgctcgaacgtcaaactcgtctgccgtgcacccagtggagtaatcgtttcaacagtagcttggatcgcggtatttttgtgtcggcgggtgaattctcactgggctttaatgactgcgcttacttcctgaacggcgcgtcagccggctatcgttatgatggcacattgccgtcctacactggtcctcgaattggaagctgtgctccgtggctggattccagcgaatggacggacgaagtgaaagaaaatctgaaacagttggccctgagctcgatggatagcatgcagaattggtttttctggacgtggcgtattggcgccagctctcgtacaggtcaggtcaatagcccgctgtggagctataaactgggccttgaacgcggttatatgccgaccgatccgcgtacagcagccggcagctgtggtaattcagatccgagaacgaccaccacgtttactccgcatacccaaaacagcataactgccgcctaccgtgctgcacatccgtttcctccaacgaacattgtggatgccaccggcactttggcatcgtacccggaaaccggtgctccggtgattatgccgtctccggaatttaaaggttttagtgtgccgaccactcagtcaggcacttgggcaaatgactatgcaccagtcgcgggttgtacctaccccgatccgtggaatggtgtgggagttgctgtgcccgcatgtgctaccggcgaacgtaagcgctttgtaaaggaaccgcaggcgtga

SEQ ID NO: 738 - DNA, 2313 bp, Artificial Sequence
  6xHis UPI000053581D
atgcaccatcatcatcaccatgagaatttgtatttccagggtagcatggcggtagatattaagaaaattattaagcaaatgacccttgaagaaaaggccggtctgtgctccggcctggatttctggcacaccaaaccggtggagcgtctgggtattcctagcattatgatgaccgatggcccacatggactccgtaagcagcgcgaagatgctgagatcgccgatattaataacagtgtcccggcaacatgctttccgtcagccgcgggtctagcatgctcgtgggatcgagagttagtagaacgcgtgggtgcggcattaggcgaagagtgccaagcggaaaatgtgtcgatcttactgggtcctggtgcgaatatcaaacgtagtccactgtgtggtcgcaattttgaatatttctcagaagatccttacctgagcagcgaattagccgcctcgcatattaaaggcgtccaatctcagggtgtgggcgcctgtctgaaacatttcgctgcgaacaaccaggagcatcgtagaatgacagttgacactattgtcgacgaacgtaccttgcgcgaaatctactttgcgtcgttcgagaacgcggttaagaaggcacgaccatgggtagtcatgtgtgcctataataagctgaacggtgagtactgtagcgaaaacaggtacctgctaaccgaagtgctgaaaaatgaatggatgcacgacggctttgtagtatcggactggggcgcagtgaatgatcgtgtatcgggtctggatgccggcttagatctggaaatgccgactagccacgggattacggataaaaaaatcgtcgaggcggtgaaaagcggcaagctgtcggaaaacatcctgaatcgtgcggttgagcgtattctgaaggtgatttttatggccttagaaaacaaaaaagaaaacgcccagtacgataaagacgcccatcacaggttagcacgccaggcggcggcagaatctatggtactactcaaaaacgaagacgatgtgctgccgctgaagaaatcgggcaccattgctttaattggggcttttgtgaaaaaaccgcggtaccaaggttcaggcagcagccacataacgcccacccgtcttgatgatatctacgaggaaattaaaaaagccggcggtgataaagttaacctcgtctattccgaaggctatagacttgaaaatgacggaatcgacgaagaactgataaacgaagcgaaaaaggctgcgagctcttcggatgtcgcggtagtgtttgcgggcctgccagatgaatatgaaagtgaagggtttgaccgtacccacatgtcaattccagaaaatcaaaatcgactgattgaagcggtcgccgaggtgcagagcaatatcgttgtggtactgctcaacggctcgcctgtagagatgccgtggattgataaggtcaaaagtgttctggaggcgtacctgggaggccaggccttagggggtgccctggccgatgtcttattcggtgaagtgaatccgagcggtaagctggcggaaaccttccctgtgaaactgagccataacccaagctacctcaatttcccgggtgaagatgaccgagtggagtataaagaaggattgttcgtcgggtaccgctattacgataccaaaggcatcgaaccgttatttccgtttggacacggcctgtcttacacgaagtttgaatacagcgacatcagtgtagacaagaaagacgtaagcgataactccattattaatgtgagtgtcaaagttaagaacgtgggcaagatggcgggcaaggagattgtacaactctacgtgaaagatgtcaagagcagcgttcgccgcccggaaaaagaactcaaaggatttgaaaaggtgttcctgaacccgggggaagagaaaacagttaccttcactctggacaaacgtgcgtttgcgtactataatacgcagattaaagactggcacgtggaaagcggcgaatttctgattctgattggccgtagcagccgtgacattgtgttgaaagaatcggtacgagtaaacagcaccgtgaaaatccgcaagcggtttaccgtcaacagcgcggtggaagatgtgatgtcagatagcagtgcagcagcggtgctgggcccggtgctaaaagaaattaccgacgcactgcagattgatatggataacgcgcacgatatgatggcggccaatattaaaaacatgcctctccgctcgctggtggggtacagccaaggccgcctgagcgaagaaatgctggaagagctagttgataagatcaacaatgtggaatga

SEQ ID NO: 739 - DNA, 2241 bp, Artificial Sequence
  6xHis UPI0000D76A70
atgcatcatcaccaccatcatgaaaatctgtacttccagggtagtatgaagatcagtcgcgtatttctcgccacgacgctggcgctaagcatgttcggttcagcgcagaggcccgatccgcgtgccgaattaatgaaaaaaccctggatggataaaaataaaagcgcggacgagcgcgctgaactggtgctcaaagaaatgacggtagatgaaaagatcaacctgatacatggacagggcatggaagagatggcggaatttggcatcccgatgcctaacaaggccctcggcaatgggggcgctggctttgtgcttggcgtagaaaggctgggcattcccctgatccagatgtcggatgctgcgtacggtgtccgttctagcgcaaaaaatggtaggtacagcaccgcacttccgagcaacctcggttcggccgcgtcatgggatccacaggcagcgtgtgagtacggagcgctgattggacgcgaattacgagcacagggctacaacatgacactgggcggaggtgtaaatatcacccgcgaaccgcgtaatggccgtacctttgaatatatgggcgaggatccgatcctggcgggcacactagtcggaaaccgcattaagtgcgaacaagcgcagcatgtaattggcgacaccaagcactatgcagtcaacgaccaagaaagcggtaggactgaggtggatgtcgtgataagcaagcgtgcaatgcgtgaaaccgatctgcttgcctttgaaatcggcattgaaattggccaaccgggtgcagttatgtgcagctacaatcttgtgaatggcacgtatgcatgccagaacaaatacctgcttacggacgtgcttaaaaaagattggaacttcaagggcttcgtagtgtccgattggggtgcgacgcactcaaccatagaaagcagtgcagcgggcttggataacgagcagccatttggtattttctattcggataagtttaaggccggtctggacagcggaaaaatccctatgtctgaattagatgatcacgtgcgccgtatcttgcgcaccgaatttgcaagcgggatcgtggataacccggtagtcaaagcggttgttgatgtggaagcgggcctggaaacggcccgtaagatagaagaaggctcaatcgtcctgctgaagaacggcaataatatcttgccactggataaagatagcatcaaatcggtggcgattatcggcgaaaaagcggacttcggcatgatatctggtggaggcagtgctcaagttgatccgccgggtccgtcgcacgaatggcaggcacacgtttggttcccgacttcgcctctgaaagccgtgcaagcaaaattaccgaacgccaaagtcgactggcgttccgggtctgacaaaagtaaagcagcagctctcgcaaagcagtctgatattgccattgtgttcgtgcatcagtggatcagcgaagggatggatctgccggatctgacacttccgtttggccaagatgagctgatcgaacgagttgcggcagcgaatcctcgtacgattgttgtgctggaatcaggcacggctgtgaccatgccgtggctggacaaggttagcggtgtggtcgaagcttggtatggcggcagcaagggtgccgatgccgttgccaatatcctgtttggtgacgtgaatccctcgggcaaactgcccatgaccttccctcgtagcgtcgaagatgtacctcatccaaaactcgcggttccaccccctaacccgaacccgatggaaacgtatatgcatcctgaacttgcgaaagcgaccgttaccgccacctacgatgaaggtgtcaaagtaggttataaatggtatgatgcggaaaagaaaccggtattgtttccttttggtttcggcctgagctatacgacctaccaatatagtggtttaaaagtgtcaagtggcaaaaccacaacggtgagctttacggtaaagaatacaggcaaacgcggtggtgacgaaattgcacaggtatatgccagcttaccggcggaagctcaggaaccgccaaaacgtctggtcggattcaccaaggtgcatctaaacgcaggtgagtcgaaagaagtgtcggttaccgtgccggccaaatatttaagtgtctttgacgaagcctcgaacggatggaagttggtgccgggctcgtacagcttcatggtcggcggtagttcccaagatctcccgcagaaacaaagtgctacattctga

SEQ ID NO: 740 - DNA, 2514 bp, Artificial Sequence
  6xHis UPI00005203D8
atgcatcaccatcatcatcacgagaatttatattttcaaggaagcatgagtagctgtatcacgaccacgatcattccgaccgaggcgtcgacaagtccgcgtctgtaccgcgtagtgccgcgccgctaccatgctcaccctctatcgctgctgactattccggtgctgcttggtccgctgacgcatgcggcggcgattacggcagggtctagtagcaccgaatctatccagagccgccaggcggcaaatggcccgggctattggctggaaagcatttcacaccaaggcattgcacccctgggtccatcgggctatcgtgtgtttcgtaacgttaaagattttggagccaaaggcgatggcatcacggatgatacggccgctattaacgaagcaataagctctggcgagcgttgcggtcagggctgtttctctagcactacgacccctgcaattgtgtacttccctgcaggtacctatgttattagtaaacctatatttgattactataacaccatcattacgggcaacccgaatgcgttgcctgttatcaaagcgtgtgcagattttgatggcggatatctgattgacggagatccgtattttggtcctgaattaaactggccggcaacgactgttttctggcgtcaagtacggaacctggtactggataccactgacgttgcagcacgcaaacaaatttcgggcattcattggccgaccgcccaagcgacgtcattgcagaatgtgatctttcagctgtctgcggacgaggggaccgagcatcaggggatcttttgcgagagcggcagcgcgggatttgctggggacctggtctttaatggtgggaaaatcgccgcggcattaggcaaccaacagttcactatgcgcaatcttacgtttaatcatgcacagaccgccatttcacatttttggaactggggatggacgtaccaggacattacgattaacgattgcgaagtgggtatcgatatttccaccggcggtagcgaacaacagagcgttggtagtattaccgtgttcgatagttctttcgcaaatacacctgttgcaatcaagagcgcccaaagcgaaagcagtaccccccgcacggcaggcagtatcattctggaaaacgtcgcaataaacaatgtggcgaccgtcgtgcagggaccgtcgggcaccgtactagctggcacgacccgtagcagcgtgattcctggttggggtcaaggcaatcgctatgtgccggatggcccaacccgctttgccggtgatattacaccagtttcacgtccagccgggctggtggtgggtgatggtaaatactatcagcgcagcaaaccacagtatgagcaactgccagtcagcgcgttctcatctgttcgtgacggcggtgcaaccggcgatggtaccaccgacgacaccgctgcgcttcagcgggttatcgacagtgcggcagcatcggaccgtgtcgtatttctggatgcaggtgtgtacaaagtcacgagcaccctacgtattccggcgggctcacgtattgtgggtgaagcgtttccggttatcctcagctcgggcgcgttttttaataatcaagaagaaccgcaacctgtcattcaggttggccaagcggggcaacaaggtcacgtggaattgagtgattttattatcagcactcagggcccgcaggcgggcgcaaccctgatcgaatggaatttggcgagcccttccgatccgagcggtatgtgggaagtgcatgcccgagttggcggttttgcgggcagccagcaaacgactcgtgaatgcgcgaagactccggagacggtgattacggaggctgacgaaaaatgcattgttgcatacatgctgatgcacgtaacaccgtccgccagtaacctgtacttggaaaatacctggctgtgggtatcggatcacgatattgacgtgcagacggaagccgacgggggtcagatcactctttacagcggtcgtggcctgaacattgaaagcacggaaggtaatatttggctgtcaggcacgagtgtcgaacacaatgttttgtacgaatatcagttcgttagcacccagaacgtttatatgggccagatccaaacggaaaccgcctactaccagagcaatcctaacgccctcattccgtttacaccgaaagcagccattcatgacccggactttgccagctcttgcaaatcctcatcagacggcaattgtgaggtgggatggggactgcgtgtggtagactcacatgatctctatgtttatggcgctggcttatattcattcttcaacaactacgatgcaggctgctccacctatggcggggaacagaactgtcagaactccattttctcaatcgaaggtgactctgcgatcaccgtgtataatctaaataccctgggcacccgttctatggtggatcgcgacggtcaatccctcgcaagttttagtgataacattagcgtgtttacgaacaacatcgtgctgttccgtagccagtga

SEQ ID NO: 741 - DNA, 1398 bp, Artificial Sequence
  6xHis UPI00032DB8C1
atgcatcatcatcatcaccacgaaaacctgtacttccaaggcagcatgacggatgcggatccacgttttcctccgggctttcgctggggtgtggcgaccgccgcatttcagattgaaggcgcatggaataccgacggtaaagggccgtcgacgtgggatacccgtgcacatcgtccgggtggcttggcaggcggtgcgacgggcgacgttgcatgcgatcactaccatcgtcttgcagaagacttggatctgatggcgggactgggcattggtagttatcgtttctccgtaagctggccaagagttcaaccgctaggacgtggccgctggaacggaggtggactggcattctatgaccgtctcctggatggccttctggcccgtgcgatcgaacctgtgctgaccgtatatcattgggatcatccgcagcctattgaagatgcgggcggttgggcatgccgtgataccgcagcccgctttgcggattatgctgaaggtttagcggttcgatttggcgatcgagtgcgtcactggctgaccctgaatgaaccgctcagcgttatgcatgccgaaatgtctggtgcacgtccagaaccggcgcgtcatcatgggcttcgtgttgcgcaccacctgatgttgggacacggcctggcagttcctagactacgcgcccatgtgcctggcgccgagatcggcatcagtttaaatctcgccggcacaactccggcaagtggacgcatggcagatgtcgcagccgctgcacgagcagaagcgtatgaagatcgccttttcctggacccgttgttaagaggagattaccctcacctagacggacggccagtcattgaagcgactgcggcagatcgtgccctgatcgccgcgccgttagattttgttggggttaattggtacgccccggcccgtgttgccgcgtcagatgctggtgtattcggctatacacgcgtgccggtacccggtgcgggtactaacctgttaggctggccggtagctccggcagaactcggtgcacttctggcgtggttacgcacccattatccggacctgccgcctattctcatcactgaaaatggctttccggataccgatgaaccagatggcacgggtgcagtccccgatcctcgcaggattgcatacctgcgtgcatgtcttgaacaagtgcgcgcagcactggatgcgggttctgatattcgtgggtaccacgtatggtcactgcttgataacctggaatgggaacacggctaccgtccccggtttggcctcgttcatgtggattttaccacccttgcacgtaccccgaaggcgtcatatcgctggtatcgtgaactgattgccgcacagccccttgatggcaaagatggtggtccttgttcaggatga

SEQ ID NO: 742 - DNA, 2568 bp, Artificial Sequence
  6xHis UPI0003519C76
atgcatcaccaccaccatcacgaaaatttatactttcaggggtcgatggttctcaaacgcgcgactcacgacgacgttagcgatagtttcgacgtagaacatgtgattcaaaacacctcagtgtcggataagattagcctgcttagcggacgagatttctggcacaccaacccgctgccggcatttaacgttccgtcggtccgtgtctcggatggtccgaacggcgttcgcggcacgaaatttgttgacggtgttccagctgcatgccttccgtgtggtacaggtttagccgcgacttgggaccaggacctcctctacaaagcaggtactctgattggtaacgaatgtattgcgaaaggcgcgcattgctggctgggcccgaccgtttgcattcagcgttcccccttaggcgggcgcggttttgaaagcatggcggaagatccgtacgcaacgggtaaacttgcggctgcctatattaaaggtgttcagagcaccggcgtggtttcagttattaagcattggttagcaaacgaccaagaacacgaacgcgtcggcgttaatgtggtcgcttcggaacgcgcactacgcgaaattcacatgctgccgtttcagattgcactgagcgatgccgcgccgggtggcgtgatggcgtgctataataaagtgaacggcaaacatgtaagcgaaaatcgtgattttttagattccctgctgcgtgaagagtggcagtggaaaggactcataatgagcgattggtttggtacctatagcaccactgaggccgttaacgcggggttagacctggaaatgccgggtcccactcgtcaacgcggacaactgctcgatctggcagtaagtacccgtaaagtgagcaggagtaccattgacactcgggcgcgtaatgtgctggaattcgtacaacgctgcgcgaatgtcccggtagctgctaaagagggcggtagagatctgccagaagaccgtcagctaaatagaaaactcgcaggcgacagcgtcgtcctgttaaagaacgaatccggacagctgccgctaaagcgtccatttaaatcaatagccttgatcggcccgaacatgaaaacaacctcattttgcggtggtgggtctgctcacctccagccctattataccgtgtcgccttacgatggcattgtagctcagttacccccggacgtggatgttcgttatgaggtcggcgccagtgcccgcggttggtatccactcatgcagggggggatgatcaccactccggaaggcgcccccggtatgcgtatgcgtttttacagccagtcaccttcagtcccggaccgagaaatcattgatgaaagccacttaccggatagctcgtggctgctgatgggctattcacacccgaagttagataaattattttacgcgacggtggagggtgatctcgtgatccaagaatctggcccctttgaatttggcctggccgtgtacgggacagcccgtttgtacgtcgatggccagttactgatcgataattcgctggtccaacgttcaggtaccttttttttcggcaaaggcacaatcgaagaaaaagctaaaatgcacctggttcagggtcaaaaatacaggattaccgttcaatatgaatccgccccgtcttctaaattagtcaaaccgggcgtggtcaacttcggaggaggcgccggtcgtgtaggactggcgagcgcaattgacccggaagttggtattcagaaggcagttagtgcggcactccaaagcgatgtgactatactgtgcgtcggtatgacgtcagatcaggaaagcgaaggctttgatcgcccgcacatggatttgccgggtaccctaccccgcctcgcgtcagcggtactggcggcggcaccggacaccattgttgtgactcaaagcggcaccccgttttcaatgctttgggcggagtcagcaaaaacgcatgtgcatgcgtggcttgcggggaatgaaaccggcaacggcattgccgatgtgttgtttggcaccacttgtccgtcgggcaaattgcctctgagcttcccgcgccgtatccaggacacccccacgtttttaaacttcggttcggagcgtggccgcgtgatttacggcgaagacatctacgtgggttaccgttattatgagaaagtggaacgcgacgtgttgtacccatttggtcatggcctatctttcaccacctttgcgtatgacaagcttaacgtcacgagcgcccatgtgagctttgaaattacaaacagtggttccgtgccggggtcagaagtctcccaactgtacattgccgcggatgaagcaaccagttcaattcaacgtcctaaaaaagaactgaaaggcttcaagaaaacttacctgcagccgggcgaaaccaaaaaagttgagattcctctggatcgctttaccacctcgttctgggatgaggaactgcactgctggttgtctgaaaaaggcgtgtatgctgtacttgtgggcagcagcagcaacaaaatacttctcgaaggcgatctgcacgtggaagccaccactcgttggacgggcctgtga

SEQ ID NO: 743 - DNA, 1158 bp, Artificial Sequence
  6xHis UPI000390F839
atgcatcatcatcatcatcacgaaaacctgtattttcagggcagtatgcgcatcccggtgccgttctttatttttggggatgtcccaggtcatccgggttgtgtggaatatctggatcgtgcctttgactgggcagaacgcgctggcctgaaagtgcttattgatctgcataccgtaccgggttcacagaacggattcgataacggtggtttaacgggcgttgttcgctggcataccaccccgcgtcaggtggcgtttgcgcttgatgtactggaacgccttgcgcgtcgctaccgcgatcgcccggctctgtatggtatagaagtcttaaacgaaccggtggaccgtttgacctatctgatgtccccgagcagcagtcgcgctaaagatcctggagaagcgcgcggttccggtcatgtgccaatgcgctttctgaaacgcttctatcgcgcagcgtatcgttggttacgtccggtcctgggcgacggaccggtgattgtatttcatgatgggtttcgccttaaccgctggcgtggatggttcgttcgtgaaggcatgcgcggcgttattatagacacccacgcgtacttagtgatgtccgagcgtccagaagttctgttccgcattttgccggatgcgtggttaatgcgttggtaccgcctgtttgctgcatggggtgctcgtcgtatccgccgtgcggcgcgttttacaccggttatggttggagaatggtgtgtggcgaatggtctggccgcgcgtatgggtgaatgcggtgcgcagggtgaagtggccagtgttgacgcctctggaggagcatttgatggatatggagcctttggcgacggtggcgcagatgttggcgatggcgcctccggtgatgttggttcgcgtgcaggagatgcgggtgatggagtacctagcccggcagctcgccgtcgagcagtctatctgcgagtagcagctatgcagttagatgcctggaatgtgagcgccggccaggtatattggtcttatcgtctgcgcggtgggcgtggtgaatttgatcgtctggcaccgcctgctccagggatgggagatggtgatgctgcagtaatggacgacacacgcctggatccttgggatctccgtcacgtatggcacgcaggttggatggggtga

SEQ ID NO: 744 - DNA, 1401 bp, Artificial Sequence
  6xHis UPI0003DFF0DA
atgcatcaccatcaccaccacgaaaatctgtatttccagggctcgatgaccgaatataaattcccgaaggaattcatttggggcaccgccactgccgctgcacaagtagaaggtgctgcgttggaggacggtcgcggtttatcaatctgggatgtgttctgccatttaccgggcgtgcgtcttgatactccggatgtggcctgcgatcagtaccaccgctatgaagaagatattgccttaatgaaaagcttaggcgttcaggcgtatcgtttcagcttctcttggagccgtattctgccggaaggcaccggcaaagtgaaccaggcgggcttagactattatcgtcgtttgattggctgcctgaaacagaacggcattcgcccttgcgccactatttaccattgggatctgccgtatgccctgcaactgcgcggaggttttggtaatcgcgagattgtgaagtggtatcttgaatatgtgaacgtgttgctgaaaaacttcggcaacgatattgacctgtggattacgtttaacgagccgatcgcggtctatgtcggctatgcactaggcttcttcgcgcccggcctcaaagacgaaaaatacgcgcgacaatgtatccataatctgctggtgtgtcacggagaggcggttaaactgtttcggagctttcatctgccaaaagcgcagattgggattacagttgacgtgtggcaccactaccctaatcgtcctgatgatccggcggacattgcgatggcgcgtcgccaaaatgaaacccaaggttacggcatgttcctgcatccgctgtttttgggcggctactcggacgaactgactgcctacatgaaaaaatggggattcacgccagatatccagagcggcgacttcgatacgattcgtcaaccgctggatttctatggcctgaacttctataacgccatctttgatcaggccgacgacccgcaccaaatggatgtgcagccgggtggtaattttcagaccagtgtccgtgagggatactactacgaagcgctgcaagatgtcctgcgcatgttaaaggacaagtatcgtctgaacattccgatctacatcaccgaaaatggcttcccccagacggatgaagcacctgatgagaaaggcgaaattcatgatcccgcccggatcgattgcgtaaaaaacgtgctgatccaattgcaccgcgcgatggaaaacggcgcggatgtgcgtggctacttcttatggagcttgctggataattttgaatggaccgccggttacagcattcgttacggaattacccgcgtggactatgacacccagaagcgtacggtgaaagatagcggcaaatggtatagtcaagtgatccgtaacaacggcttcattgaaggtggagcgatctga

SEQ ID NO: 745 - DNA, 2490 bp, Artificial Sequence
  6xHis UPI0002D3D994
atgcatcatcatcatcaccatgaaaatctgtactttcaagggtccatgacacttcaggaaaagattgcgcagatctcccatcttcagtcgtgggatgtgttcgatgggcagaaacttaacaccgcaaaattggccaaaatgtgcggtgacaagggttacggcttctttgaaggcttcccgctgactgcagcgcagtgccgtaaaaacttccgtataattcaaacttacctgcttgaacagacgcgcttaggcattcctggcttcagtgtcgccgagtccttgcatggcgttgtacatgaaggttcaaccatctatcctcagaacatcgcaattggctcgacgttcaacccggagttagcgtatgaaatgaccaaacacattgccggggagctgaacacgattggcgttaaacaggttctggccccatgtattgacgtcgtgcgtgaacttcgttggggccgtgtagaagaatcatttagcgaagatccttttctatgtgctcgcatggcagtggctgaagtcaaaggctacatggaccacgggatcagcccgatggcgaaacattacggcccgcacgggaaccctcttggcggtttaaatctggccagtgtagaatgcggcatccgtgatttatttgatgtttatctcgaaccgtttgaagctattctggcggaaacggacattctcgcggtgatgtcgtcgtataacgcctggaaccgcgaaccaaattctgccagcaagttcatgctgaccgacattctgagggaccgcttcggctttcgcggctacgtgtacagcgactggggtgtgatcgatatgttgaagaatttccacgaaaccgcagggaatgacttcgaagcagcgtctcaggtgcttactgcgggtctggatgtggaagcctctagcttgtgcttcaaaagcctggaaagcaaagtcctggcaggggaattcgatgtgcgttacattgatcgtgctgtgaaacgagttctccgcgcgaaattcgaactgggcctgtttgaagatccctacctagaaaagaacagctatcgttggccgttgcgtgcgaaagagtgtgtctcgctgagccgccagattgcggatgagtcgaccgtgttactgaaaaacgaaggcaacctcctgcctctggatattaagaaactgcgcagcgtggcggtgattggaccgaatgccgattgcgtgcagtttggggattacacctggtccaagaataaagaggacggcatcaccccgttgcagggcatttgtcgcctggcaggtaaaaaagttaaagtaaattatgcccagggctgcagtattgcgagcttcgatcagagcggtattgaagaggccgtctgtgccgcccaacagtcggacgttgcgctgctgttcgttggcagctcgtctaccgcctttgtacgccattcttctgcgccgtctacctcaggggaaggtatcgacctgagcggtgtggaattaacaggagcgcaggaagaactcattgaagcagtatgtgcgaccggaaaacctgtggtcctgatcctggtggcaggcaaaccgtttgccattccgttcgcaaagaagaacgttccagcgatcctcgttcagtggtatgcgggcgaacaagcgggcaattctatcgccgatattttgttcgggaaggttaatccatcggggaagatcagcttctcgttcccgcaaagctcaggccacctgccggcgttttataaccacctcaccaccgataagggattttataaagaaccgggcacctatgaaacgccaggccgtgattatgtttttagcagcccgaatcctctgtgggcgttcggacacggactgagctacactacctttgatctggtgagcgcaatcgcagataaaacccactatcaagcgcatgatacgatcgcggtcaaagttaaaatcgcgaactctggcgaagtcgcgggcaaagaggtcgtgcaactgtatatccgtgacgtggtttcaaccgtcatgacccctgtgaagcagctcaaagcgtttgagaagatttccttaaatcccgcggagactaaagaaatcaccctgaaagtgccggtacacgaactatatctgacggacaacattggtaaccgctatttagagccgggtacttttgagattaaagtgggcaccgcctctgaccgtattgtgcaccgcattagcatcgaggtaggttctaaactggagaaaaccccggtggtggatagcccgcagatcatcaaggtgacaccgagcggcgaatttattacagttcaaggctttgtgcgcgacgcacaggccacaccggtggcctacgttacggtgcgcgcgatctccagtggccaggaaacgcaaacagacgaaaaagggttctattcgattaacttacgcacggatgattccattgcgttcgtgaaggcccgttttattacccagcagatggaggttaagggtcacaaaaacatcaacattcgattggtcaaatga

SEQ ID NO: 746 - DNA, 2595 bp, Artificial Sequence
  6xHis UPI00042F8016
atgcatcatcatcatcaccatgaaaacctttacttccagggctcaatgggtgacatagaatcgttcaattttccgtatggcgaactgttgcagcacctgaccaccagtgagaaaatcagtttgttgtcaggttcggatttttggcatacgcaaggtatcccgcgcctgtccattccgaaactacgtatgagcgatggtccgaatggcgtccgcgggaccaagtttttcaacagcgttccggcggcctgtttgccgtgcggaaccggtctggcggccacatggagtcatgatttgatgagagaagccggagatctgatcgcacgtggttgtcatgcgaagtctacccatgtatggttgggcccgacgacgaacattcaacgttctcctctgggcggacggggttttgaaagcttctctgaggacccgcttttaggtggcagcttagccagcaccctgatttcgaacgtccagaaaaatggcatcgcctgcagcctaaaacattttgtagcgaatgatatggaacatgaacgcaccctggtcgattgccgtattagtccacgcgcattccgcgagatctatttgctgccgtttcagattgcaatacgtgacgccgacccgtgggccctgatgacagcgtataacaaagtgaatggtcagcacatgagcgaacatcaggagatccttcaggagattgtccgcaacgaatggggataccgcggttgtatcatgtccgattggttcggcacctactccaccgcggcggctatcaacaatggcctcgatctggaaatgccgggccctacagagcaacgcggcaaacgagttgccacagcgttaggggtagggaagattaagtccagcaccattgacgaacgtgttgctagcgtcctcaagctagtggaacgtgctggtgcctcgggcatcccggaagggggcccggaatcatgcttggatgcggaccaggaccgttcagtccttcgtcgcttggcgacggaaagcgtagtactcctgaaaaatgatgaccacgtccttccgtttcgtgccgataaaaaagcggtgattggccctaatgctcagaaatcattcttctgcggcggaggctcggcgagccttaggccaactcgtgttgtctctattctggagggcctacgtgaccaattagaacagccggtcgaacacgccgaagcctgccagatttataatcagcttccggtcctaggagacattattaccgccccggatggtacccccggccagttcctgatgcgtatctacacctccccccctactattcagccgaataactctgaaattactgacacgcgcgaggcgattgacgttctgaagcttgatgatagcaacgtcgtcctttacgactatagcaatgccgcggcgcccgacaatgtcgtgtatgcgactattactgctgatttagtagtggaaaatacagacacgtacgccttttcactgactgtagccggcacagcgacgctgtacttagataacgcgctgattgtggataacagccactcgcaaaagcgcggtacaagctttttcggctcgggtagtgtggaacagattaaccatgttcagctggtggcgaaccgcgtgtataaactccgtgtcgaatttggtagtgcggcgacttctgatcttaataaagcgggcgctccggtatttggtgcggggggcgttcgcattggctgcgtgcgctgctcaaatgaatcgctagaactggatcgcgccgtggagttagctaagaccgctgatcaggttgttgtatgcgtggggctaggacctgagtgggaaagcgaaggtagcgatcgctcgctgtatgaactgccaggtagacagtctgagctgatctcccgtgtagccgcgatcaataaacatgtggtggtgatcatccagtccgggacacctgttagcggtccgtgggatcaagtagcggcagtaatgcagacctggtatggaggtaacgagctgggtcatggtattagcgatattgtccttggtcgtgaaagcccgtcgggaaaactccctttatcatggccgcgctgcattgaagataatccatcgttccttagttaccgctccgaggcgggtgcctgtaactacaatgaagacatttttgttggttatcgcttctacgataagacaaaacgcaaagtgcagtggccgtttggttttggcctgagctacgccagcttcatcctgcagcagccgtcagtacagttgcgtggaagcggtgttgacggtaatatcctggtgaccctgccagtgtgtaataattcggcgactacgtcaggcaaggaggtcattcaggtgtatgtgtcacgcattactccgagctcggtttcgagacctgtgaaagaactgaaaggctttgcgaaattattcgtggcagcgggcgaaactcggcaggcggccattgagatccccctgaagaacgcagtttcggtgtgggatgtgaccaccaattcatggctcctggaagaaggaatttataaactgagcgtgggcaattcgtcagatagctcactcctgtcaacccagtttcaggttccgattacccagcactggcgaggtctgtga

SEQ ID NO: 747 - DNA, 1743 bp, Artificial Sequence
  6xHis UPI00000A7F40
atgcatcaccaccaccatcatgaaaatctgtactttcagggttctatggccctgctacttgccagcgctattaatcacaccgcacacccagcaggactgcgtagtcaccctaacaacgaatcctttagccgacaccatctgtgctcatccccgcagaacatttcgaaacgtcgtagcaacctgtcgttccgcccgagagcgcagaccatcagctccgaatcggcgggaattcaccgtctcagcccgtgggaaattccgcgtcgagattggttcccaccaagcttcttattcggtgccgccacttctgcttatcaaatcgagggtgcctggaacgaagatgggaaagggccgagcacctgggatcatttctgccataactttccggagtggattgtcgaccgctctaacggtgatgttgccgctgattcgtaccacatgtatgcggaagacgtgcgtcttcttaaagagatgggcatggatgcatatcgctttagcatttcatggccgcgcattctcccgaaaggcaccttggcgggtggtattaacgaaaagggtgtggagtattacaataaactgattgatttgctcttagaaaacgggatcgaaccatatatcacgattttccactgggacaccccgcaagccttggtggatgcgtacggtggttttctggatgaggaagactataaagattatacggatttcgccaaagtttgctttgagaagttcggcaaaacggtgaaaaattggctgacctttaatgagccggaaactttttgttcggtttcttatggcactggtgttctggctccgggccgttgctctccaggtgttagctgcgcggtgccaaccggaaatagtctgagcgaaccgtacatcgttgcccataacctgttacgggcacacgctgaaactgtggacatttataataaataccataaaggggccgatggtcgcattggcttggcgttgaacgtatttggtcgagttccgtacactaataccttcctggatcagcaggcacaggaacgcagcatggataaatgcttaggatggttcttggaaccggtcgtacgaggcgattatcccttctctatgcgtgtcagtgctcgagaccgcgtgccgtactttaaggaaaaggaacaggagaaactggttggctcttatgatatgatcggcattaattactatacgagcacgttttccaaacatattgatctatcgccgaataattctccagtcctaaacaccgatgatgcctacgctagtcaggaaaccaaaggtccagatggcaacgcgataggccccccaacaggcaatgcgtggattaacatgtacccgaagggtctgcacgacattctgatgacgatgaaaaacaaatacggcaatccgcccatgtacattactgagaacggcatgggcgatatcgataaaggcgacttaccgaaaccggttgcgctggaagatcacacgcgtctggactacattcagcgccatttgagcgtcttgaaacaaagcattgatctgggcgccgatgtgcgtggttactttgcgtggtcattactggataattttgaatggtccagcggttacaccgagcgttttggtattgtctatgttgaccgcgaaaatggctgtgaacgaacgatgaagcgtagtgcgcgttggttgcaagaattcaacggagccgcaaaaaaggttgaaaacaacaaaatcttgaccccggcaggtcaactgaactga

SEQ ID NO: 748 - DNA, 1383 bp, Artificial Sequence
  6xHis UPI000050B701
atgcaccaccatcatcatcacgaaaatctgtacttccagggttcgatggaaaaactgcgctttccgaaagactttattttcggcaccgccaccgccgcctaccaaattgaaggcgcatacaaggaagacgaaaaaggcgaatcgatctgggatcgcttttcacatatcccgggcaacgtggcgaaaatgcataatggcgacatagcctgtgatcactaccaccgctataaagaagatgtacagttgctcaaatccctgggcattaaatcttaccggttcagtattgcgtggccgcgtatttttcctaaaggctttggtgaaatcaaccaaaaaggtattcagttttaccgtgatctgattgacgaactgatcaagaacgacattgaaccggcaattaccatctatcactgggacctgccgcaaaagttacaggatatcggtggttgggccaatccgcaggtggcggattactacgtggactacgccaatctgctgtttcgcgaatttggcgatcgtgtgaaaacctggatcacgcacaatgaaccgtgggttgcaagctatctcggttacgcacttggtgtgcatgcgccgggaattaaggacatgaaaatggcgctgctagcggcccacaacattttgctgagtcactttaaggcggtgaaagcctatcgcgagctggaacaggatggtcagataggcatcacgctaaacctgtcaacctgctactccaatagcgcggatgaagaagacattgctgctgcacacaggtctgacggttggaataaccgttggtttctggatgcagccctgaaagggacctatccggaggatatgataaaaatcttttcggatacaaacatcatgccggagctgccgaaagaactgttcacagaagtgttcgaaacctcagatttcctgggtattaactactatacccgccaggtagtaaaaaacaacagcgaagcttttattggcgccgagtcagttgcgatggacaacccgaaaaccgaaatgggctgggaaatttatcctcaggggctgtacgatctgctgacccgcattcatcgagactatggcaacattgacctctatattaccgaaaacggcgccgcgtttaacgatatggttaaccgcgatgggaaggtggaggatgagaatcgcctggattatctgtacacccactttgcagccgcgttatcagcgattgaagccggcgtccctctaaaaggctattatatttggagcttcatggataatttcgaatgggccgaaggctacgaaaagcgcttcggcattgttcatgtgaattataaaacgcaggagcgcaccatcaaaaaaagcgcgtactggtacaaggagttgatcgagcgatccaacaagtga

SEQ ID NO: 749 - DNA, 2412 bp, Artificial Sequence
  6xHis UPI0002C29EAA
atgcaccaccatcatcaccacgagaacctgtattttcagggtagcatgaccatctctaaagaaatcgacgtcgaacagacgatcagtagcctatccatccgcgataaggtcaaattcctcagtgcagccaatttttggcatctggccgggcatccagatgcggggattggtagcgtacgtgtgtcggatgggcctaacggcgtacgcggtattcaattcttcaatcgcactcaggcctcctgctttccttgcgcggcgggcctcgcgtctagctttgatttagatctgatccgctctgttggtcgtgccttgggtgacgaagcgcgtttacaaggtgcccacattctgctgggtccaccggtaaatatgcatcagaacccgttagggggtcggagtttcgaatgcttttctgaagatcccgtttcttcaggcttagcaggcgctgctcacgtccagggattgcaggaacgtggtgtggcagcgtgcctcaagcactttgtggcgaacgagcaagaatatgaacgatactccgtcgactcagtggtgccggagcatgcgttgcgcgaagtgtacttggagccttttcgtttggtcatgaaacacgcacctccgaaatgcttaatgactgcacataatcgtgtaaatggtactcatgcgtctgagaatgccaatctgctgcaggatatcttaagaaaagaatggaattgggacgggctagttctctcagattggaccggtgtgtactcggttgttgagagcgttaaagcaggtctggatgtcgagtttcccggcccgggtgtgatgcgtggccctccgctcaatcgttccctccaggccggcaaattaacctcggaagatgtggatgcgcgggtacgtaacgtactgaaactccacaactatgctgtccgcagcggtattcctttcgatgcgccagaagaatcagtggatacccccgagctgagagccctgctccgcaaagccgcatcctcctcgattgtgctgctgaaaaacactaaaagcgtactgcctctcgcgcctaagttgggccagaaaattgccgttatcgggccgaatgcgtttaccgcacagatctcgggcggaggttcggcggaagtgaatgcgagctatcgtgtcagtcctttgcagggaatttgggaagctgccgaagaagccggcgcccaggttaaatacgcgatgggtgcggccgcgttcaggttcgtcccgaacattgatatctacattgtccagtcgaatacccgtcagtcttcttcatttatgcttatggatggtatcccgctcgatctggtgggccctattccctacatttgcgtttctgcgacctttacaccgaccgtgtctggtccgtggttattcggcttaaccagcgttggtgaagcaaacttatttctgaatggcgaactgcttattgacaataacaaggcgtatgttcccggcgaaacattctttggccaaggctcgatggaaaagcgcaatttagtgcaacacatggagaaggggaaacagtatgagattaaggttcgtatgcatttgagttcgcagcgcgcgggccacggtccggtggcttttacaggtacgctcaaactgggtgccattccgagtttggaagagagtaccgcaatcatggaagctgttgaagttgcgaaggcctgcgatgcgtccctgccgggcagcattaatccgttggtgtccgcggtgttggcggtcaatcccaacacggtggtagtaaaccagtccggtacccctgtcagcatgccgtggcttgatcaggcaccggctgttgtccaggcgttttcgggtggtaacgagcttggacatggcttggccgatgtcttgttcggtaaagtgaacccaagcgggaaactggcggttacttttccgaagcgcctggaagattgtaacacatacgagagcttcggtatcaccacacccacgccagggaaagtatattatacggaagggatctacgtgggttataaacatgttctgtgtagagacagcgttctctttcgtgtgtgggcggttctcttgttacggtggcactttcgcccgtcagccaatcgcgtaccgtcacgttttccgttacgcgtgaccaatacgggcgcggtctacggcgcggaagtggtacaggtttatgtttctgagttatctcctcctctgccggaagtaccgcgtgaactgaagggctttacgaaaatttttttaaagccgggtgaaagtacgtcggcgcgtgtaaaactggaccgcgaagcgtttcgctattgggatgaacgccatgccgagtggcgcgcggaaaaaggaaaatacgagattctggtgcgtgcatcaacacgggatgtccgtttacgtggcacagtggaactgggtaatcgcctgcagtggaccggaatgtga

SEQ ID NO: 750 - DNA, 2502 bp, Artificial Sequence
  6xHis UPI0000126913
atgcaccatcatcatcaccacgaaaacctatatttccagggctcaatgattgacgacattttagacaagatgacgctggaagagcaggtgagtctcttgtcgggagcagacttctggacgaccgttgcgattgaacgcttgggcgtgccgaaaatcaaagttactgatgggccgaatggcgcacgtggaggcggtagcttggtcggcggagttaaaagcgcatgttttccagtagcaattgcgctcggcgcaacatgggatccggaacttattgaacgtgcgggtgtagcgttgggcggtcaagcaaaaagtaaaggcgccagcgtgttgttagcgccgactgtgaacattcaccggtcgggcctcaatggtcgcaatttcgagtgctacagcgaggatccggcattgacagcggcatgtgccgtggcgtacatcaatggcgtccagagtcaaggtgttgccgcaacgataaaacactttgtagcgaatgagtcagaaattgagcgtcagacaatgtcctcggatgttgatgagcgtaccctacgtgagatttatctgccgcccttcgaagaagcagttaaaaaagccggcgtgaaagcggtcatgtcgagctataacaaactcaatggtacctatacttcggaaaatccctggctgttaacgaaagtgctgcgtgaagaatggggcttcgatggtgtagtcatgagcgattggtttggctcacactctactgcagagactattaatgccggtctggatctggaaatgccaggcccttggagagatcgaggtgaaaagctggttgccgccgttcgagaaggtaaagtcaaggcggagactgtgcgtgcaagtgcgcgtcgcatcctcttactgctagaacgcgtgggcgcgtttgaaaaggccccggatctggcagaacacgcactcgatctgcccgaagatcgggccctgattcgtcagctgggtgcagaaggcgcagtgctcctgaaaaatgatggggttctgccgttagcaaagtcatcgtttgatcagatagcagtgatcggcccgaatgccgcgagtgcccgtgtgatgggcggcggttcggctaggatagcagctcattataccgtgtcaccgcttgaaggcattcgcgcggcgttaagcaatgctaacagcttacgacatgcggtgggctgcaacaacaatcgtcttatcgatgtcttcagtggggaaatgacagtggaatacttcaaaggtcgtggatttgaaagtcgtccggtacatgtggaaacggttgaaaaaggtgaattcttttggtttgatctaccgagtggtgatctggacttagcggactttagcgcgcgcatgactgcgacttttgtaccgcaggaaacgggagaacacatatttggtatgaccaatgcggggctggcgcgtctgtttgttgatggcgagttggtggttgatgggtatgatggctggaccaaaggcgaaaacttctttggcaccgccaatagcgaacagcgtcgtgccgtcactctgggagcagcccgtcgttatcgtgttgtggtggaatacgaggcgccgaaagcgagcttagatggtatcaatatttgcgccctgcgctttggtgtagaaaaaccacttggtgatgcgggcattgctgaagctgtcgaaactgcgcgtaaaagcgatattgtgcttttattggtgggccgcgagggtgaatgggacaccgaaggcctggatttaccggatatgcgcctaccgggtcgccaagaagagctgattgaagcggtggcggaaacaaatccgaacgtcgtcgtggtgcttcaaacgggtggcccgattgagatgccgtggctgggcaaagtaagggctgtactccagatgtggtatccggggcaggaactggggaatgcactggcggatgttctcttcggcgacgtggaacccgctggacgtcttcctcaaacctttcctaaagcactcactgataactcggccattaccgacgacccgagcatttacccgggtcaggatggccatgtacgctacgccgagggcatttttgttggctatcgccaccatgacacccgtgaaatcgaaccgctgttcccttttggctttgggttaggctatacgcgttttacctggggtgcgccgcagctgtctggcacggaaatgggtgctgatggcctgaccgtgaccgtggacgtgactaatatcggtgatcgtgctggcagcgacgtggtgcaattgtatgtccattctcccaacgcgcgtgtggaacgtcctttcaaggagttacgtgcctttgcgaaactgaaactggcaccgggtgctaccggtaccgccgtactgaaaattgcgccacgagatctggcctattttgatgtggaggcaggccggtttcgagcggacgccgggaaatacgagctgatcgtggctgcgtcggcaattgatatccgtgcgagcgtcagcattcatctgccggtcgaccacgttatggaaccttga

SEQ ID NO: 751 - DNA, 1434 bp, Artificial Sequence
  6xHis UPI00006E0CC7
atgcatcatcatcaccaccacgaaaacttgtactttcagggtagcatgtcagcagcgaaactgccgaaaagcttcgtttggggttacgcgaccgccgcatatcagattgagggctcacctgacaaggatggccgagagcctagtatttgggacaccttttgcaaggcgccgggtaaaattgcggacggctctagcggcgatgtagcgaccgattcatataaccgctggcgcgaagatgtgcagctgctgaagagttacggcgtcaaagcgtaccgcttctcactcagctggagccgcatcattccgaaaggtggccgttctgatccggtcaatggtgccggtattaaacactatcgcactctgatcgaggaactcgtgaaagaaggtatcaccccgttcgtcacgttgtatcactgggacctgccgcaagccctggatgatcgctatggcgggtggctgaacaaagaggaagcaattcaggatttcaccaattatgcaaaactgtgcttcgaatcatttggcgatctggtacagaactggatcaccttcaatgagccgtgggtgatttcagtgatgggctatggcaatggaatttttgcccccggtcatgttagcaacaccgaaccgtggattgtgagccatcatattattctggcgcatgcacacgctgtgaagttgtaccgcgatgaatttaaagagaaacaggggggacaaatcggcattactctggattcccattggctcatcccctacgacgatactgatgctagcaaagaagccacgttacgagcgatggagttcaaattaggtcgtttcgcaaacccgatctacaagggcgagtacccgccgcgcattaagaaaattctgggtgaccgcttaccagagtttaccccagaagaaattgagttagtcaaaggctcttctgacttcttcggtctgaacacttacaccacgcacttagttcaggacggaggtagcgatgaactggccggttttgtgaagaccggtcacactcgtgctgatggcacgcagttgggcacccagagcgatatggggtggttacagacctatggtcccggctttcgttggttgcttaactatctgtggaaagcttacgacaagccggtctacgttaccgaaaatggctttccggtgaaaggggaaaatgacttgccggttgaacaggccgttgatgatacggatcgtcaggcgtattatcgagactatactgaagcccttctgcaggcggttaccgaggatggtgcggatgttcgaggttattttgggtggagcctgctagataactttgaatgggccgaaggctataaagtccgctttggcgttactcacgtagattacgagacgcagaaacgtaccccgaaaaaaagcgcagaattcctgagccgctggttcaaagagcatatcgaggagtga

SEQ ID NO: 752 - DNA, 1488 bp, Artificial Sequence
  6xHis UPI0000126905
atgcatcaccaccatcatcacgaaaacctctatttccagggttccatgaagaacggtatgttagcgcttggtatgacagccgcagatgtaccggacaactttttgtggggcgcggcgtccgctgcataccaggttgaaggcgcgaccaataaagacggtaaaggccgtagcgtatgggattactatctcgacgaaaaacatctggccggtcctggcatttcgggagcactccgtctgactttcacagatcgggaccaatatctgaaagatatccagctatttaaagaattggggctgaacagctatcgcttcagccatcgcctggatacctattatccggatggacaaggtcctgtgaacctccgtgcagtggctcattaccgccagtttattactgacctggaagccgctggtattaaaccgttagtcacgctgtatcattgggatatgccagaaagtctgagcgccgcaggtggttgggaaaaccgcgaaagcgtggaatggttccagcgctatgcggaagtcatctttgcaaacttttccgaccaggtggaccagttcgtgctcatcaatgaaccgaccgttgaagtggcgacgaagatcatggcagaaaaacgtttgaaaggagaggagctgactctcccccctattgtgccagccggttcgtacttggagaccagtttgaaatcctataaccacattctgcttgcgagtgcggcagcggcggaatcattcaaggttaaaggttataagggtcgcctgggtatcgcactgccgttttttccggtgttgacgacagagaacgctagcgacgaggataaagcagatgctcgtttagtagacggcattctgaatcgttggttcctcgatgccatgtataaaggtaactatccggccgatgttctcaaattagctgcggatcgccatctgaacattgacgtccagcctggcgatgcagaacgaattcacgatgccggtttaggcttccttggaattaactattacgcacccttctttatccgccatcagaagaacgcgagcgaagtctacagcccggagattatttttccaaaaaatgagaaacttgcctttaatggtgcggttcgcccggatcaattctctgcactgcttgaacgtgtccgcgatgaatacggtaacccgcctgttattatcacggaaaatggcgcaggctttgaaggtgaggaccaactgaccaatggtaaagtgaacgacgtaaatcggtgcctgtatctggttgatcacattcatgcgatgcgcgagagcattgcccgtggtgcaaatgtgcaaggctattacgtatggagttcacacgacaatctggagtggttgtcaggctacaaatcacgtttcggtatgatctacgtcgactatgatacacagaaacgtaccccgaaactgagcgcggagatctacggcaaaattattcgtggcgaaaacataagtgatgtggattgcaagagcgattga

SEQ ID NO: 753 - DNA, 1395 bp, Artificial Sequence
  6xHis UPI00033056C4
atgcaccaccatcatcatcatgaaaacctgtattttcagggtagcatgaaacgtagcgacttcggggatgactttacctggggcgtcgcatctgcggcgtttcagattgaaggtgctccgtcagctgatggcaaagcaccgtcaatttgggacgaactgacgcgcaccggcaaaattgcgggtgaaggaggcgatcagggcattgatttctataatcgatatccggaggacattgaaatgattaaagatttaggcttcggtgcgaaccgcattagcctgagttggccgcgtctgatggggacgggtcgtgaacgcttaaaccctaagggagcagacttttacgatcgcgtgattgatgccacactggaagcggggatggagccttgggttacagtacatcattgggatattcccttagccttgtggcaggaaggtgggtggacacgccgcggtatagtggaagattttgcaagattcgccgaggtgtgtgcggaacgttttggtgatcgtgtgaagaagtggatggtgttcaacgaacctgcgtctgtggcgggtcatttggttctgggtctgtatggccgtaagggactgcatccaaacactactcttcgctctgttcatcacataaatctggcctgtgccgaagcaggccgtcgtatgcgtgcagccctacctgaagatgcggaaattggtactaccaacgttatgagcgttgcatacccgtacgaaccgacggatgaacgcactgctcgtcgtaaacgtgcgattgaagccctggcaattgatatgcacctggatccggcaggcggtttggggtatccattcggcgcaaatcgcttacttaacttaatgaagcgccatattgaagatggcgatctggaatcagcccgcttcgaatacgattttatgggagttcaatgctacggtccactggtggcgctgcgtaagctcccagttgttggtgcagtgccgactatgactgtaccgggggcagaagcccgtgtgtcgagcgcgatcggtattccgcaagatgccgacgcgctactgtggacgtttcgtaagtatgctaatcatcccgtagctaaacgcatggtagttactgaaggcggctttggaggccaggatcggttagaacccgatggtcgcgttcgcgatgacattcgcatttgggtgtaccggcgtaacttggaagcagtgcttgccgctaaagccgaaggcattaacgtcgatggctactttgcctggagctacgcagataatgttgagtgggtactgggccgttcgccgcgtttcggcattgtgtacaccgattatgacaacgactatcgccgtattccgaaagatagcgccaaatggtttcaacgcttgttgactaccgacgctggagttgactga

SEQ ID NO: 754 - DNA, 2658 bp, Artificial Sequence
  6xHis UPI0003427F29
atgcatcatcatcaccatcacgaaaacctttattttcagggctcgatgggcaagacgaaacgttcgttgaaagtgaaccgtagagatttcttcacccttggagcggcgaccttattagcagcgattagtctaccggatggcgatttgctggccttcgcacagaaagaacgcgagaaagatctggtgtatggcattcgtcgcgagcgctttgaatgggcgcagaaaaaggccgcggcacttgtggcgcaaatgacacgtgaggaaaaaatatcgcaagtgggcaacaatgttccagcaatcccgcgcctgggcctcccggcatacaattactactccggggaagccctgcacggacttgtacgtggtggaccggttacctccttcccgctcccgctggcccttgcaaacacctggaacccggaattgcagtatcaggtgtatacggccgttagcgatgaagcccgcgcctaccataatcgtgacggcgtcggtttggcgtactattcaccacaaacgattaatacggctaaagacccgcgttggggccgtattgaagagaccttaggtgaagaccctcatctgatgtctcttatggcggttcaagccgtacgcggaatgcagggcgatgatcctaattacttgaaaacagtagcatgcgccaagcactatattgcgaacgaaacggataatgaccgcaccgccgtcagcgaaacggtggatccccgctccttttgggaatactatgtgcgtccattctatgcgtgcgtggttgatggcaaagtgttcagtgtcatgggcgcatacaacgcggtgaacggcattccgtgttgtgccgataaaaatctgctgacaggtatcctgcgtgaacgctggggtttccagggttatgtcacaagcgattgtgacgccatctataatatctacgacccgcatcattatgccacttctctggctgaggcctgcgccatgggcatcaaagcgggttgcgatctggactgcggtgatacctacccgcgccacctgggggaagcgtttgaacagcacttgcttgaggaagcggacttggacaaggcagtcacccgcttgctaacggcacgattcttattcggtgacctggatccggagcctcgttgcccgtacaacaaaatcccgtttagcgttgttgacagcccgaaacatcgtgcgctggcactggaagcagcgcgccagtctatcgtattactgaaaaatgatggaatcctgccattagataaaactgccctgaagtcggtggctgttatcggtccgaccgccgccattgcgcacttaggcggctattcgggcgcaccgttcctccgcgtcagtccgttaagcggtattgcccaagcgctgggtataggtattcacttcgatgaagtgtatgcctatcaagcggtccgtctggaaggcggcccgcagctggaaagctctgtagaacagggtggcaccgatattggctttattaaaaacggtagctgggttgaatttcccgctactgattttgcgggcaagaacgagattgaagttcgtgtggccagcgatactcagggcgggaccattgagattcaccttgatcgccttaatggtccgttactgtgcactctgcaggtaccgcataccggcggctggcagaattggattagcctgaaggcgccgattaacggtgtaattggtaagcataagttgtttttcctgtttaagggtggtgatggctatctacttaatgtggcatggtaccgtctaaaccctcccagtccaccagaaacccataatccgaacggtatcgcactcacatatcagcagggttgtaccatcacgggcgcgcgtaacgataccatgtttcaaaaagctgtggaggcggcacgtcaggcggacgttgcaatagttgtcgccggcgtaaatcaagaagttgatgccgaaggccatgatcgcgatgatattcgactaaccggcgctcagcatgaactgattcaggcggtctaccaggccaacccgaaaaccatcctcgtgctttctaccaacgcgccggtggccgtgacttgggaacaggagaatttaccggcgatagtcgcagcaatcttcgcaggtcaagcccagggcaccgcgattgcggatgtattatttggaaactacaacccgtctggcaagttagcaacaacctggtacaagagtgtagaagatttaccagattttcatgattttgatattactaaacgcacctacatgtatttcgagggcgaaccgctgtacccgtttggttatggtctgtcatataccaccttccagattggtaatatacaggttagccatccacgcctgacctctggaggctcgatcacggtgtctgtagacgttacgaatattggcaaacgggcaggaacagaagtggtgcagctttacgttcgcccgccgaaatcaccagttaaacgccccaacaaacagctggttgatttcaaacgtgttgagttgcgcccgggagaaactaaaagggtggaactgtctctaccgtacgaaagtccagctttgtggtattgggatgtcgcgcagagcaaattcgtcctgcagccgggtactgtaacccttatggttggcaactcctcggcccatattgcacacaccaccaccattgaactggtgtga

SEQ ID NO: 755 - DNA, 2385 bp, Artificial Sequence
  6xHis UPI0003B04208
atgcatcatcaccaccaccacgaaaacctgtacttccagggcagtatgtacgacgataaaattaatagcattctggaggtgctgacgttagaggaaaaggttagcctgttaattggcgaggatcactggcgtatcaaagcaatccccaaaacggatctgaaagccgttgtgttcagcgatgggcccaatggcctgcgtaaggaagtatctaccaagaagcaaacattcatggcgcagagcgagaaagcagtctgctatccgtcattagccctgcttggctcaagctttaaccgtgatctgatctatcaggtaggtaaaatgattgcgaaagaggcgcgtgatcagtcagttgatgtcttgctggcaccgggggctaacctgaagcggaatccgctgtgtgggcgcaattttgaatacttctcagaagatccgtaccttagctcggagtgcgcgattaactatattaatggggtacagagtgaagatgtgatggcgtgtctgaagcatttcatactgaacaacaacgaaaataatcgaatggtgtcgaacagcattattgatgaccgctctctgcacgaggtgtacctgaaccagttcaaacgtaccattaccaaagcaaaaccagcagctctcatgacctcgtacaataaagtgaatggctcgtatgtttgcgagacagacctgcttaagaaagagattcgcgagaagctgaactataaaggcctggtaatgacagactggcaagctatgaatgatcgtgttgcgtcctacaaacacggccttgatctggaaatgccgggcggcttcaaacctacgcagattattaaagcggtaaagaacaaaacgttggatgaaaaagtgattgacgaagccgtgtgccgcatcatccacaccgccatccaggcagataaaaaccgtaaaccgtcggaattctcggtgctggaggcccgtaaactcgcaaaaatagcagcgattgaaagcttcgtactgctaaagaataatggcgttcttccctttaaaaccgacaagcagattgccctaatcggaaagctggcaaaaaaaccacgctatcagggggcgggctcatcgcgtgtgaatcctcgtgaagttgtttcactctacgatgaatttattcgcaacggtaaacgcttcgaatacgcgtacggctacgaagagaccacggaagcggtagatgaggctctaattgaagaagcggtgactaagtctcgtaataaatcgttagttgtggttgtcctgggcctgtacgaaaaagaagagagcgaaggcttcgatcgtacccaccttaacctgccgattaaccaactgaaactgatggaacgtctgatcgtggaatgtaaaaacattgtttgcgttatcgagacgggaagcagtgtacttcttccatttgaggccggagtagatgcaattatgttgagctacttttcgggggaaatgggtgatgcaggtctttacgatgttctgactggtaagttctcgccgagcggccgcctccaggaaacttttctgtacgacttaaacgatctagaatcaactaaatactttaatcaagggattaacagttattataaagaaggcatttatgtaggctacaaggatttactgtcgctcggtaaaaaatcacactacccttttggcttcgggtgctcctatgcgaagttcggctatcaatacgtgggcgttgataaagacatcgagaaactcactttccgcgtcctggtgaccaacacgagcaatattgatagtaaagaggtgatccaaatctacatgggcaaaaaggacagcaaaatttaccgtgaaacctatcgactggtgggtttcaacaaacagatggttcggcagaaaaccacagtcgaattccagattgatgtattattggacgatctcatgtgctatatgaccacgacgaaacaaatgtgtttagaagaagggtcgtatgagttctatataggaacctcctctagcaaccacttcaaagaagtgtcaattaatctggcgggccacagctttgaccagaatccgaacacgtatccaatccagatgacgacgaaggaatacctgacttatttctcacagccgatcgttgaaaacaacattacctcgaaataccatgcgaacaccacctttgaggacatcagcgaccggttactgggaaaagtgctgctcagcgtggcgattaagaagatcaaaaaaatgagtaaggatgacctcaccgtgcatatgatgactaaggcgatgaaagcgatgccattacgttcactggaaagttcaaccaatggcttttttaaccagaaccgcgtaagcggtcttgttctgatgctaaaccgcaaacgtattctggggcttatcaagatcatcaaagggtga

SEQ ID NO: 756 - DNA, 1458 bp, Artificial Sequence
  6xHis UPI0003E13BD3
atgcatcatcaccatcaccacgaaaacctctacttccagggctcgatgtctgcctttcctaaagattttctgtggggagccgcgacagcagcgtatcaggtggaaggagctcatgatgcagatggcaaaggtccgagcatctgggataccttttcccacttaccggggacgacctatcagggtacgaatggcgatgttgctgtagatcattatcatcgttttcgcgaggacgtagcgcttatggcggaaatgggtatgcagtcgtaccgctttagcatctcatggccacgtcttctgccccagggccgtggcaccgtaaatgaagcgggcgtgaagttttactctgatttgattgatgccctgctggagcataatattgaaccgatgattaccctgtatcattgggacctgccgcaggcattgcaggatgaaggtggatgggaagcccgcagtaccgcggaggccttcgaagaatatgctcgtctgtgttatcagcgttacggtgaccgcgtaaaattgtggagcacattcaacgaaactgtgtgcttcataggtttcggttatatcacgggcggccatcctccgggtgtaaaaaatcccgcccgcgcactccaagcctgccatcacgtgtttgtagctcacgcgaaagcggtggcggcctttcgtacaagcggcattaacggcaagattggctttgttaacgttctgcagactcacacgccactgtcacagagtgccgaagatctcgcagcctaccagcttgcggagggcatttttacccattggctgtacgatccggtgctgaaaggcgaatacccggcgcagcttttagcacaagcacaggctgtgtggggtgtaccgcagtttgcggccggcgatgaacaactgctgcgggacaatatctgtgattttattggcctgaactactataaacgcgaaacgatcgcggcgaatcatcacgaaagccacctgaccatgaataccagtggcgaaaaaggcaaaggccatcaacaaggcaacgaattcggcttcaaagacctgtttaagtttgtgcgtaatccgaccggagtgtataccgattgggattgggaaatctatccgcagggcttaaccgagggcataatgaatattaaagcgcgctacggcgatattccgatgtacattaccgagaacggcttgggtgcgaaagatccgattattaacggtgaagtggttgacgatgatcgaatcgattacctgcgtcagcacattggtgccattgaagacgccatcaaacagggtgcagacgttcgtgggtattatccttggtcgtttatcgatttgctgagttggctgaacggatttcagaaacagtacggcttcgtgtatgtggatcacaataaaggcctggcccgccagcgtaaaaagtcgttcttctggtatcagaagcttattggctctaacggagccgaacgctga

SEQ ID NO: 757 - DNA, 2568 bp, Artificial Sequence
  6xHis UPI0003ECCF80
atgcatcatcatcatcaccacgagaatctgtattttcaaggcagtatggcggaagcgaactttgtagatgtcgaagccctgctgagtaatttgacgctcgatgagaaagttgaactgcttgccggtcagggttcgtttaggatgacaggcctcgaaaagcacgggattcccgcactgatcacttcggatggcccgcatgggattcgcggtcgcagaagctttactcgcatgccgtcgccaatgttgccgtcggccactggcatgggcgccacgtttaacaccgaactgatccataagatagggtcgctgttgggtgaggaagctaaagtgcgcggcgtgcatgtgttgctagccccgaccttgtgtctgcagcgctcccccttaattggtcgtggttttgaggcgtttggcgaagatccttttctgtcaggtactctgggagcccattatattaacggtgtacaggagcagggggttgcgacatcagtgaaacactatgcggcccatgaccagagcgacaacagcattgaggacaatgtggttatgaccgaacggactctgcgcgaggtccatatgctgccgtttcagcttgcgctccgcggttcagacccgtggacgataatgacatcatataacaagatcaatggcatccatgtgtcagaagatccgctgctgatgaaggaaattctgcgtgaagaatggggctttaaaggattggtcatgagcgactggttcggcacctattccactagcgaagcaatcaacgcgggtttggacctggaaatgcctggaccgacggattggcgcggcaaacgcctgagcatcgcggttaattctcgcaaggtgtcaaaagcaactgtggataccgcagtggagaatgttctgaatctggtgaacaaatgcaaggcgggcgagaagtcaggcaaaccgcctcaatcggatacgccggaacagcgtgctctgatccgtcagctggtagccgaaagcgttgtgctgctgaagaacgataaacaacgccttccgataggtaatccgaaaaatctgaaattcggcttaattggcgatcatgtcaaaaatccggcgttatgcggcggcggtagcgccgaagtagaaccatactacgggatcaccccctatgaggccataaaggaagtcgtaggagaagaaaatatcacctataccccgggctgtaactcctttcgcttctcaccgctaataaaagggcatacccctcctgactctgataccgagggttggtcggttgaaatcttcggcgaagacccgcaggagagtccgaacgcaaaagtgctggtgtctacgaccgcggaaaaacagctggttgatgtgcctgaaagctatcacgcctccctgccaaccaaattttatgcgcgcgccaaagcgaagtacactatccatgaaagcggtaaactgaagttcggcttctccacgagtggcaaaggcaagctactgattgatggtaaagaagcgattgacctgtggacgtcgcagccgcccaaaaccgatagcacgccctgcttcaacagattaagcatggaacgcttctatgaaggcgaatttgaaaaaggccaggtacttgatttggaggtgttgcaagttaacgaaagcctctccggtggcgtcggtactgcacagaccctggccgggcgcgtgggcatctttgaattatataacgaagaccagggaattaaagatgcagttgatctggcaaaaaaggtggacgtacccatagttattacgggcctaagttccgatttcgaatatgaaggatctgatcgtaagcacttacgtctcccgggccgtgttgatgaattgatttcggcggtgcttgaagccaacccggattcaattattattacccaatcgggtctgcctattgaaatgccgtgggaaagccaagcagccactctgttacatgcgtggtttggtggccaggagaccggtcatggcatggcggatgtcctgtttggtaaagttaatccttcaggtcgcctaagtctgaccttcccaaaatctgtgaaacatactcctgcatacctgacgttttctaaagccgattacgacatcgtgtatggtgaaggtgtcttcatcggtcaccgatattatgaaatggtggaccgtgaaccgctgttctactttggccatggattaagctactcaaaatttgagtacagcaacttgaatgtccctaatgaattcacgccggcggcagatcaccaaatgcgcgtgaccgtggatattaccaataagggcgcgttcgcgggggcagaagtggttcaactctatattcatcacgcggatagcagtctgcaacgtccggtgcgcgaacttaaagccttcacgaaggttaacgtagatgttaatgaaaccaagactgcggaactgaccctggacaaatactcgctgagtttttgggaccaagaagcatcgaaatggaaagcggaggcgggtaaatatactgtgattttggctagttcttcaaatcccaaagatgaaatcgcgcgagccgattttacccttccgaaaacattcttttggaaaggcctgtga

SEQ ID NO: 758 - DNA, 2652 bp, Artificial Sequence
  6xHis UPI0004305856
atgcatcatcaccatcaccacgagaacctttatttccagggctcgatgaccttagtaaaggcgcagcctccgttgaacaacggccacgttaaaaacgaggcgaaggaatgggcacaggataagctgagtcagatgaccctggaggaaaaagtgttactgctaaccggtgaggacctttggcgtaccaacgcgattccgcgcctcggcatttcacgtattaaaaccagtgatggcccggttggtgttcgcggcggtatttttacagacggcgtaagcgccgcgtctgctccgacaggtgtttctctagcggccacatgggatctgagcgttattcgagacgtgtgctctgtgctcatccatgaagcgaaaagcaaagaagtggatgtgcttctgggtccgactgtgtgcatcccccgtacgcctctgggcggccgtaattttgaagcctatagcgaagatccgtacctgaccggcaaaattgccagtgaattcatcaatcgcctccaggacgcgggtattggtgcgtgtatcaaacatctggcggcgaacgatcaggagactcgacgctttttcatcgacgagaagattcccgacagagcgttgcgcgaaatcgccttacagccgttccagattgccatccgcgattcaaatccgtggaccgtgatgaccgcgtacaacaagattaacggcaccttttgtagcgcgcacgactttctgatacaagatgtgctgcgcaaagaatgggggtgggatgggctggtaatgtccgattggttcggcaccaacagcgtcgtgccgagcgttaaagcgggtctagatctggaaatgcctggacctgtgcgtcgtcgaggcaagcacttgattgacgcataccaaaagggtttagtggatctgtcgtttatcgatgcctcggccagccgtgttttggaattagtccacaaggtcgggaaatcgaacattccggactggaaagaaggtcaagagaaggcagacgatctgcctgaacatcgcgcaatttttcgccgtgcgggtgcggaaggtattgttctgctgaagaatagcgccaaactgctgccgctgagcaacttagatggccgccgtatcgcgattctgggacctaatgctctgcgtagtgttgccacgggaggtggctcatctaacctggcgccccattaccgtacaaccccataccaaagcataaaatcggaaattgcagctaagtttccgaccgcgaaagtacacgcgcatgcaggtatcctgacccatcgatacattcctctggttgaccaggatgtgatgacgaacccggaaacgggtaaaccgggatttcagctgtgcctgtatcgcaatatgaatcacggtggccaaccgtttatggtagaacatcgtccgagtagcaacctggtatgttacgatggcctgcctccggaacttaccaccggtgaaacgtactcgtaccgtggtcgcaccgtgttgaaacccaaaacgaccgggctacatgaatttagcctcagcagttgtggaccgggtaagctgatgttggatggtgaggttatcattgatattgagcgccactggtggagcccaaaaagcagcctgtttatgagctatggctcaccggaagagcgtgtcaaagtttatatggaagccggtcgcgagtacgagctgctgctcgagtcgatctcacgcgaaccgaaaccgtatgatctggattacatggcagagctggaacgcgaagaagtacaagatggtggccgcattggattcatggaaaacccgggagatcttgatcgtttttttcaggatggtatcggtatggcacgcgatagcgatgttgccattgtggtcgtgggcaaagatcatgagtgggaaacggaaacctcagatatggtaagcatggacctgccgggcaggagtaacgaattcatttctgcggttgcggccgccaatccgaacacgattgtggttaaccagaccggaagtccgattacgatgccgtggaaggataaggtgagtgcaattgtgcaggcgtggtaccaaggccaagaacagggcaattgtctggcagacgttctgttaggcacggtgaaccccagtggcaaacttccaatcacctttccgaagcgcatcgaagatactcctccgtatgataactaccctggggaaaatgacgtagtctactacggagaaggaatctacgcgggctaccgcttctatgatcaccgtaaaattgaaccactgttccctttcggtgcgggcctgagctacgctacctttgagtacagtaatatgcgtatcagtagcaacgaattccacgaagaagcgggcattgaggtggaagtagatgttaccaatataggcccgagggatgggaaagagattgttcagttctatgtcgggcagattaacccccgtttacaccgtcccgttcgcgaattgaagggctgggaaaaagtctttgtgccagtgggccagaccgtcaccgcacgaatgaagattgacaaagtctctctgtcgtactgggatgattcagtggccaaatgggtgatcgaaaaggatgccgaataccgtgttaccgcggcgaaagatagcagcgatgaaggtctgactgcagcctttcgtagcccgaaagagtaccagtgggtcaattga

SEQ ID NO: 759 - DNA, 1434 bp, Artificial Sequence
  6xHis UPI00006E0CC7
atgcatcaccatcaccaccatgaaaatctgtacttccagggcagcatgagcgccgccaaactgcccaaatctttcgtctgggggtacgcgacggcggcctatcaaattgaaggcagcccagataaagacgggcgtgaacctagcatttgggatactttctgcaaggcccctgggaaaattgcagatggttctagcggagacgtggcaaccgatagctacaaccgctggcgtgaggatgtccagctgctgaaatcgtatggtgtcaaagcatatcgctttagcctgtcttggagtcgcattattccgaaaggcggtcgttcggaccctgtgaacggggctggtattaaacattaccgtactctgattgaggagctggtcaaagaaggtattaccccgtttgtaaccctgtaccattgggatctgccacaggcgctcgatgatcgttacggcgggtggttgaataaggaagaagcgattcaggacttcaccaactacgcaaaactgtgttttgagagctttggtgatctggtccagaattggattaccttcaacgagccgtgggtgattagcgtcatgggttacgggaacggtatatttgcaccgggccacgtttctaacaccgaaccttggattgtgtctcatcatatcatcttggcacacgcccacgcggtcaaactctatcgcgacgaatttaaggaaaagcagggtggtcagatcggcattaccctggatagccattggttaatcccttacgatgataccgatgcgtcgaaagaggctaccttacgtgcaatggaattcaaactgggccgctttgcaaacccgatctataagggcgagtatccgccacgtatcaaaaagattctcggcgatcggctgccggaatttacccctgaggaaatcgaattagtgaaaggcagtagcgacttcttcggcttgaatacctacactacccatttagttcaggatggcggcagcgacgaactggcaggattcgttaaaacaggtcatacgcgtgccgatggtactcaactgggcacccaatccgatatgggatggcttcagacctacggcccgggttttcgatggcttttgaactatctgtggaaagcctatgataagccggtgtacgtgacagaaaatggtttcccggtaaaaggcgaaaacgatcttccggtggaacaggccgttgatgacaccgatcgacaggcctattatcgtgactacactgaggcgttattgcaggcagtgaccgaagacggcgcagacgtgcgcggctatttcggctggtccttgttggataactttgagtgggcagaaggatataaagtacgctttggcgttacgcacgttgactatgagacccagaagcgcactccgaaaaaaagcgcggaattcctgagccgttggttcaaagagcacatcgaggaatga

SEQ ID NO: 760 - DNA, 1752 bp, Artificial Sequence
  6xHis UPI00000A7EFC
atgcatcaccatcatcatcatgagaacctgtacttccagggttcgatggcgcttctggtcgggggtacactcaacccgaccactcacctgagtctgcgcagcagagcgggtcgtaattcggagaatgtatggcttcgcagcgccgcctcaagccagacctccaaaggtcgcttttgcaatcttaccgtgcgtgcgggcaccccgtctaaaccgagcgaaccgattggacctgtgtttactaagttgaaaccgtggcaaatccctaaacgggactggttttcaaaagattttttgtttggtgcctcgacgtcagcctatcaaatcgaaggcgcgtggaacgaagacggtaaaggcccctcgacctgggatcacttctgccatacttacccggaacgcattagtgatggtaccaacggtgatgtagcagctaatagctatcacatgtatgaggaagatgttaaagccctgaaggatatgggtatgaaggtttaccgctttagtattagttggtcccgcattctgccgaatggtacgggaaaaccgaaccaaaagggtatcgactattacaataacctgattaattccctgattcgccacggtatcgtaccgtacgtaactatctggcattgggataccccgcaggcgctggaagacaagtacggtggctttctagataagcagattgtaaacgactacaagtacttcgcggagctgtgctttcagtcctttggcgaccgtgtcaaaaattggttcacctttaacgaaccgcacacctattgttgctttagctatggcgagggcattcatgcaccgggccgttgcagcccgggtctggattgcgcagtgccggaaggagatagcctgcgtgaaccatatacggcggggcatcatattctgctggcgcatgcggaggcggttgaactgttcaaggcacattataacaagcacggggacagcaaaattggcatggcctttgatgtaatgggttacgaaccttaccaggacagtttcctggatgaccaagcccgagaacgcagcattgactataacatgggatggtttttagaacccgtggtgaggggggattatccgttcagcatgcgttcattgattggtgatcgcctgcctatgtttaccaaagaagaacaagaaaagctgggctctctctgcgacattatgggcctgaattattacacctcacgttttagcaagcatgtggatatttcgagtgattatacgccgaccctgaacaccgatgatgcgtacgcgagctcagaaacgaccggcagtgacggtaacgaaatcggaccgattacgggtacttactggatttacatgtacccgaaaggcctgaccgatcttctgctgattatgaaagagaagtacggcaatccgcccattttcattacggaaaatggcattgcggatgttgaaggtgatccggaaatgccggatccactggacgattggaaacgcctggattacctgcagcgccacattagcgcggttaaagatgcgattgatcagggcgcagatgtgcgcggtcattttacttggggtttaatcgacaacttcgaatggggcagtggctattcatctcgctttggccttgtttatattgacaaagaggatggcaacaaacgtaagctgaagaaatcagcgaaatggtttgccaaatttaatagcgttccgaagacactgcttaagaccaccaataataacgcgacggtgacagcatcggtaagcgtgtga

SEQ ID NO: 761 - DNA, 1407 bp, Artificial Sequence
  6xHis UPI0002C0273E
atgcatcatcaccaccaccatgaaaacctgtatttccagggcagcatgtttcagtttcccaaggattttatttggggcgctgcgacgagcagctaccagattgaaggcactgctacgggcgaagacaaaatctatagcatctgggatcacttcagccgcatcccgggtaaagtggcgaacggtgataatggtgatattgcgattgatcactacaaccgttacgtggaggacgtagcactgatgaaagcactgcaccttaaagcgtaccgtttttcaacctcctgggcacggctttattgcgagacaccaggcaaattcaacgaaaaaggcctggacttttacaagcgcttagtacacgagctgctggagaataacatcgagccgatgctgaccatctaccattgggacatgccgcaggccctgcaagagaaagggggctgggaaaatcgcgacatcgtgcactacttccaggaatacgcggcgtttctgtacgagaatttaggtgacgtagtgaaaaaatggattacccataacgaaccctgggtggtaacgtatctgggctatggtaacggggaacatgcaccgggaatccagaacttcacatcgtttctgaaagcggcgcaccatgtgctgttatctcatggcgaagcggtgaaagcattccgtgagatcgggccaaaggatggtgaaattggaattaccctcaatctgaccccgggctacgcagttgatccaaaagacgaaaaagcggttgatgccgcacgtaaatgggacggcttcatgaaccggtggttcctcgatccggtatttaagggccagtacccggcggatatgctggaagtgtataaagactacttgccggatgtgtaccaggaccgtgatctgcaaaccattcagcagccgatcgatttctttggtttcaactactacagtactgcgaccctgaaagactggaaaaaaggtgagtatgaaccgatcgtgttcgatcatgtgagcacaggccgccctgttaccgatatgaactgggaagtgaacccgaatggtctgtttgatctgttagttcgcctgaagaaagattatggcgacattccgctgtacattaccgaaaacggtgcagcatacaaagaccgtgtgaacgaagacggcaaaattgaagatgatgagcgtgttacctacatccgtgaacatctgatcgcgtgccaccgtgccattgaacagggtgttaacctgaagggttattacgtttggagcctcttcgataactttgaatgggcctttgggtacgataaacggtttggaatcgtttatgttgactatgaaacgctggaacggatcccgaaaaaatcagccctgtggtataaggaaactatcattaacaacggcctgcaagtggacaacgacaagtga

SEQ ID NO: 762 - DNA, 1386 bp, Artificial Sequence
  6xHis UPI0000126906
atgcaccatcatcaccatcacgagaacctctactttcagggaagcatgaatgtcaaaaaatttccggagggctttctgtggggtgtggcgaccgcatcttatcagattgaaggtagtcccttagcagacggggcgggtatgagcatttggcatacgtttagtcacacgcctggcaacgtgaaaaatggtgatacaggcgatgtggcctgcgatcattacaatcgttggaaagaggacattgaaattattgagaaactgggcgtgaaggcctatcgcttcagcattagttggccccggattctgcccgaaggcaccggtcgtgttaaccagaagggcctcgatttctacaatcgcatcattgataccctgcttgagaaaggcatcactccatttgtgactatctatcattgggatttgcccttcgcgttacagctgaaaggcggctgggcaaaccgtgaaattgcggattggttcgccgaatatagccgagttctgtttgaaaattttggtgaccgcgtcaaaaactggatcactttaaacgaaccgtgggtggtggccattgttggtcacctatatggcgtccacgcgccgggcatgcgtgatatttacgttgcattccgagccgttcacaatctgttgcgtgcccatgcacgcgctgttaaagtgtttcgtgaaactgtgaaagatgggaaaattggtattgtgttcaacaacggctacttcgagccggcaagcgaaaaagaagaggatattcgtgcggtgcgctttatgcatcagttcaataactacccgcttttcctgaacccgatctatcgtggcgattatccggaactggttctggaatttgcgcgtgaatacctgccggagaattacaaagacgatatgtccgaaattcaagaaaagatagactttgtgggactcaattactattcaggccatctggtaaaattcgatcccgatgcacccgcgaaagttagctttgtagaacgtgacttgccgaaaactgcgatgggctgggaaatcgtgccggaaggtatttattggattctgaaaaaagtgaaggaagaatataatccgccggaagtgtatatcaccgaaaatggcgctgcatttgatgatgtggttagcgaagatggtcgcgtacatgaccagaaccggattgattacctgaaagcacatattggtcaggcgtggaaagcaatacaggaaggcgtacctctgaagggttattttgtatggagcctgctggataattttgaatgggccgagggctacagtaagcgtttcggcattgtttatgtggattatagcacccagaaacgcatcgtaaaagactcaggctattggtacagcaacgtcgtaaaaaacaacggtctggaagattga

SEQ ID NO: 763 - DNA, 2196 bp, Artificial Sequence
  6xHis UPI00003C2ACC
atgcatcatcaccaccaccacgaaaacctgtactttcaggggagcatgaaccgcattgataccttactggccgccatgacccttgaagagaagatcggtcaactgaccatggctactgcagggtatgcgatcacggggccggtgctgggtggagatgtaaccgacggcattaaagctggcaccattggcagcctcctgaacgtttggggagcagaagcgtcccgcacgatccaggcccttgcagtagaaaacagcaggttaaaagttcctctcttctttggtttcgatgtggtgcatggccaccgtacagtctttccgattcctctcgctgaggcagcggcctttgacccagtcctgtgggaagaaaccgcccgtgcctctgccgaagaagctgccgcagatgggttacacatgacctttgcgccaatgattgacatagcgcgcgacccccgttggggccgtattgcggaaggccctggtgaggatccgtgggttggcgcgcgtatggctgaggcgaaagtacgtggtttccagggtgcggatctggccgataccacccgtgtgtgtgcaaccgcaaaacatttttgtggttatggtgccgctatcgcgggtcgcgactatgcgtctgcggaaattagcttgcagaccttacatgaagtttatctgccaccttttgccgcagccgtgaaagcgggcgtcggtgccgttatgccagcgttccatgatattggtggggtcccgttaacagctcatattccgctgctccgtgactggttacgcggagaagttggcttcgaaggcgtgctggtaagcgattataatgccatagcagaattaattaagcatggagtggccggtaccctcgcggaagcggcagcgttggcacttaacgcgggggtagacattgacatgatggccactgcgtattcacgtggtctgcctgaggctctggaacgcggtctgaccgacatggcgcacattgatgccagtgtgcgtcgcgtgctcggtctgaaagaacgtttaggcctgtttgatgatccgtatgcacgttgcgctccccgtgtggatgctgaaggtgaccgtgcccggcgtttgttagctcgcaaagcggcgtcacgttcggtggttctgttgagtaatccggccaaaatcttaccgttgccgagtcgattacaccgtctcgcagtggtcggcccgctagcggacagccgtgccgatatgcgtggaccttggagcgccgcagggttaccggatgatccggtttcggtcgtggagggcctgcgtgatctgcttcccgcagattcgattgcgtttgcccctggcattgaccttatgggcaaagatttatcgggtgaagaggcagcactggacttatgccgtgctgcggaggccgtggtattatgcttgggcgaagcggctaccatgagcggcgaggcaaactgccgggctgatccaggattgccaggtcagcagcgcgcctttgcggaaaaagtattcgacctgggggttccggttattgtcgtgctttttagcggccgtcccctgattctgccttggttgattgaacgcgccgacgctgttctggcggcctggttccctggttgcgaagcgggccctgccattgccgaagtgttgctgggtttatccgatccgggtggccgcttaccggtgagttggcctcgtcatgttggtcaggtgccgttgttttttggagcacgtagtggtggacgtccggagaacccggaagatcactataccagcaaatacatggatatgccaaacactccgcagtttccgttcggacatggtctgagctatggggactttgcactcgaagctctgaccgtaggtccagacgaggtgagtgcggatggtgtgatcgaagtgacggtgagcctaatcaataaggggggtcgaccgggtcttggctgtgtgttcctctttattcacgaccccgttgctagcgttgcacgccccctgctggaattaaaaggggtgttacgcgcggaagttgaagctggaggtcgctgcgaattacgctggagtttgccagtggcggacttggcatttttgggcgccgatctgaccccgcggattgaagcaggtgtaattgaaattgcagttggcaggagtgccgaccctgaagggttgttgcgtcgctccgtacgcattcttactccgcgacaccaggggtga

SEQ ID NO: 764 - DNA, 2208 bp, Artificial Sequence
  6xHis UPI00000B9013
atgcatcatcatcaccatcatgaaaacctgtactttcagggcagtatggaaaaggtaaacgaaattctgtcacaactgaccctcgaagaaaagtctgagacctgcagcgggggctggacgtcgggggtagtttggaaatcgcattctggatggcgttgtaggggggaaacccatccggtaccgcgcgtcggccttccggcattcgtgctggcagatggtccggcaggccttcgcatcaatccgacccgcgaaaatgatgagaacacgtactatacgaccgcctttcccgtggaaatcatgctggcatccacatggaaccgtgaactgctggaggaagtcggcaaagccatgggtgaagaagttcgcgagtacggagttgacgtcctgctgggcccggcgatgaacatccatcgcaatcccctgtgtggacgcaatttcgaatattactcggaggatccggtgctgagcggcgagatggcgtcatcattcgtaaaaggtgtgcagagtcagggggtgggtgcgtgtatcaaacactttgtcgccaataaccaagaaaccaatcgcatggtagtggacaccatcgttattgagcgcgcccttcgcgaaatctacttacgcggttttgagattgcagtcaaaaaaagcaagccatggagcgtgatgagcgcctataacaaattaaacggcaaatattgctcgcagaatgaatggctgctgaaaaaagtcctccgcgaagaatggggatttgaaggtttcgtcatgtccgattggtatgcaggtgataaccccgtggagcagcttaaagccggcaatgatctgatcatgccgggcaaagcatatcaggtgaataccgaacgtcgagatgaaattgaagaaattatggaggcgcttaaagaagggaaactctcagaagaagtgttggatgaatgcgtacgtaacatccttaaagttcttgtaaatgcgccgagcttcaaaaactaccgctattccaataaaccggatctggaaaaacacgcgaaagtagcgtacgaagccggcgccgaaggagtggtcctattaaaaaacgaagaagccttaccgttgtcagaaaactctaagattgcactgtttggcacgggtcagatcgaaaccattaaaggaggaacgggctcaggtgacacccatcctcgatatgcgatcagcattttagaaggaatcaaggagcgtggcttgaattttgacgaagagctggcaaaaatctacgaggactacattaagaaaatgcgcgagactgaagaatacaaaccgcgccgcgatagctggggcactattatcaaaccgaaactgagcgagaatttcttgagcgaaaaggaagttcacaagctggctaaaaaaaatgacgtagccgtgattgttattagccgcatttcaggcgaaggctatgaccggaaaccggttaaaggtgatttttatctcagcgatgatgaaaccgatctgattaaaaccgtctcacgcgaatttcacgaacagggcaagaaagtcatcgtgcttctgaacatcggctccccggttgaagttgtgagttggcgtgacctagttgatggcatcctcctggtttggcaggccggtcaggaaactggtcgcattgtcgcagacgttctgacaggccgtattaatccgagcggaaagctgcccaccaccttcccgcgcgattatagcgacgtgccctcatggacatttccgggagaaccgaaagataacccgcagaaagtggtgtacgaagaggacatatacgtcggctatcgctactatgatacgtttggtgtggaacccgcgtatgaatttggctacggtctgagctatacaaccttcgaatactcagacttgaacgttagctttgatggcgagactctccgtgtacaatatcgcatcgaaaatacgggcggccgcgcagggaaagaagtaagtcaagtttacattaaagccccgaagggcaaaattgacaaaccgtttcaggaactgaaagcgttccacaagacgcgcctgttgaacccgggcgaaagcgaagaggtcgtactggaaattcctgtacgtgatctggctagcttcaatggtgaggaatgggtggtggaagcaggcgaatacgaggtccgtgttggtgcgtcatcccgaaatataaaacttaaaggcaccttctcagtcggcgaagaacgtcgttttaaaccgtga

SEQ ID NO: 765 - DNA, 2619 bp, Artificial Sequence
  6xHis UPI00032F466E
atgcaccatcatcatcatcatgaaaacctgtactttcagggtagcatggaagacgatggtgccaattccaagacggaactgtcagatcagcgcaaagtagccctactgtctggcgcggatgactggcataccgaagcagtaccggaactgggtttagaagccgtaatgatggccgatggacctcatggcttgcggaaagtgatgtcagcatcgctagccgatctgcaagcgtcggaaccggcgacatgctttccgaccggaagcgcgttagccgccacttgggatcgagtgctcgccggtgatgtagggcgcgcgattgggcgtgaggcggtggcagaaggtgtcggagtagtactgggcccggcagtaaacttgaaacgtcatcccgccgctggtcgtaactttgaatatttctcagaggatccattcctggctggagagcttgcggttgcctggattgatggagtgcagggtgaaggcgtgggggcctcactgaaacactttgccgtgaataaccaagaggcgaatcgcatggtcgtagacgcagtagttgatcctgcgaccctgcgtgaactttatctgggcgcatttgaagccgcggtgcgcaggagccgcccttggacagttatgagcgcgtataacctgctgaatggcgtttattgcagtgaagatccgtggctcctgtcggaattattacgtgatcagtggggcttcgacggtttagtggttaccgactggggtgcaaacgatgaccgcgtggctggcattcgtgccggtcaggaccttgagatgccaggtggtcatggcacacatgatgctgccgtactagcggcactagctgatgggagtcttcaccgagcggatttggatggttgtgtaagacgtgtgctggcgctgttagaacgtgctgacggtgcccgttcaggcagacctggtagtgcgatggcctcaccgcgccccggcgcggatcccgatgccttacaccgtgaacaccaccagttagcgcgccgtgcagcagctgcgggcacagtgctactgaccaatgacggaacgttaccgttagctccgagcggtcatgtagccctgattggggaatttgcagcacaccctcgtttccagggcggcggctcttcgcaggttaaggccacccgtagtgacaatctgcacgcagaattacgcacccatgtcgacgccgccggaggccgtgttcagtatgctccgggatacgtattacgtgcacgcgatgaccgtccaggagaaccagcgcggcgtgtcgatgaagcggtgagcattgcgcgcggtgccgaggtagccgtggtggttgtgggactgccagacgccgtcgaatccgaaggatttgaccgagaccatctccatcttccggaaagtcacaatattctggtgcgcgcagtctgtgcggccaacccgaataccgtagtaatcgttgtcgcaggttccccggttacgatggactgggtagaccagccggccgccattattcatgggtatctcggcggccaggccgcgggcggggcattggcagatgtattggttggtgccgctgaacctggtggccgcttggcggaaacattcccggttcgttctgcgggtgtggcatcggatcgatggtttccgggagaaccacatcaggtgacgtatcgcgagggaccgtatattggataccgttggtttgatgcctcaggtgcgacccctctttttccgttcggtcacggtctgtcttacgcggaaattacccttggcgtaccgaccctgagtgctcagcacgtggatgccggagtgttattgggaggaaccgatgtcgtagccccggccgaagtcccgccgccaggggcggggccggtggcgttcacggtgactgtgccgttaaccaatgccggcgatcgtgcgggaagcgaagtggttcaagtgtacctggaatctccggacactggtcgtccggccgcgcatcgtcatctggtgggttttgcgaaagtcaacttggaacccaacagtacccgggaagccaccgtcgatgtccatgcacgtgcgctctgccattggcatccggcagatcgcggttgggccgtatcagcgggtacgtggggcgtcgccgtgggctgctcaagcggcaacttaccgcatggacttatggttgaggtggcaagctcctggagcgccccggaacccgatccggccttggacccgtatcgtaatcctagaccggatgattgggatccgggtgtcgccgcctttgaagctctgcttgggcgttctgttcctgaaccaactccagtgcgcccgtttactcgaaatacgacgctgggcgaacttggcgaaacccgtttgggtcgcccgttactggcattagtgcgtgccatcgttgcgcatacgacggggggggcccacgatgaaggcgggctgggggcgatgattgaccgtagtttaggtgaactgccgttacgcaatttagccgttatgtcacagggccgtgtgccgatgtctgccatcaaccgtctaattgctcttgcaaaccgtatgccgggtcatccggcgggtcaccccccgggccgccctccgggtcgtagtgtgggtttcactcgcccgggccgtcgtcgttga

SEQ ID NO: 766 - DNA, 2415 bp, Artificial Sequence
  6xHis UPI00032874EC
atgcatcaccatcatcatcacgagaacctatatttccagggcagcatgggcaactttcgcgaggaaatgtacgccgaaaagtacaaagacaacctgctgtccccggaagaacgttccgaggatcttctcagcaaaatgaccttgcgcgagaaagttggccagcttaaccagcgtctgtacggcttcgattgctataaccgcatcgatgatgaagtcgaactgtctgctgaattcaaagaggaagtgaaatattggaatggcttaggggttctctatggcttatatcgcgccgatccgtggtcaaaacgtgatttcaacaccggcctggaaggtagtctggcaattaaagcgtacaacctcgcccagaaatatgtggtccgccactcgcgctttggcattccgatgttgatgagtagtgaatgccctcatggacatcaggcgttagatggttatctgctgccagttaacctggcaatgggtgccgcgtggaacccggaattgatggcctctgcctatggtgtttgcgctcgccagatgaaagatctcggcgtgaacctagccctcgtgtcgatgcttgatgtgctacgtgatccgcgttggggccgcagtgaagaatgcttcagcgaggatccgtatctgtgctcggtactggccgaggcagcggttaagggctgccaggaacgtggcgttccggtggtggccaaacacttttgcgcacaaggcgaaggcaccggtggaatcaatgccagcgccgcacgtataggtgagcgtgaattacgtgagatccatctgcctcctgccgcagccgtgtgcaaagcgggcgtcaagggtattatggccgcgtataacgaaattgacgggattccatgccacggtaatagccgcctactacaagacattctgcgccgcgagatgaattttagtggcgtcgtgatggcggatggcaccgccgtggatcgtctggatatcttgaccggggataacatgcgttctggcgccttagcattatcatcgggtgtggacattagcttatgggataaaggttttaccgggcttgaagaagcagtaaaaaaaggccttgtgagcgaaaaattgattgatcgtgcggttttaaaagtactagaactgaaattccagctgggcttatttgagcgtccatatctggaggaagcgacagaaaaagaagcccccctggtcgaagaagagaaacatagctgcccgagccgccagccttaccgctattcatacgaacagcatccccagtcattggaactggcgcgtcagtccgcggtcctgttaaaaaacgaggggattcttcctttagacctgaagaaagtgaagagcatcgccgtgattggtccgaacgccgataatatttacaatcaactgggggattacacccctccgttacgcaaaggtgagggtattaccctgttgaagggactggagaatctatgcagtgacacgaaaattcgttatacccctggctgtagtattggcggcaaagacgaaaccggtatcaaaacagccgttgagctcgtctcaagctctgatattgtgatcctggcattaggagggtcatcaagccgttttgcaggcgcatcattcgatatcaatggagcagcggtgaccccccagccggatgtagaaagtgcacgtaacttccagatggactgcggtgaaggcgtagattgcgcgggtctgacactgccaggtgtgcaacaggagcttgcccgcgcagtgtttgatacaggcaaacctgtgatcaccgtgctaattcagggccgtccgtacgcggtagaagaagcggcagcgcgttcgcgcgcgttgattgcggcattttatccgggcccgatgggaggacaagcgttagcggaaattctacttgggaaggtgtgtccttcaggctgtctccctgtgtctattcctcgttctgcagggcaactcccagtgtattataaccataaagtgtcttatgatgctatgcgttatagtgatatggcgaacaccccgctattcccgtttggctttggactctcgtataccgggtttaaagcggaaaactttaaacttaccaccgagaatatctcgctggaaaaactcgaaaaaggagaaaagtttgagttggcgtttaccgtgcgtaatgccggcaatttagagggccatgcggtgctccaattatttgttcaggatctgcaagcatccactgtgcgccgcatccgtgaactaaaaggctttaccaaggtgcgtctagcagcgggtgaggaaaaagcctgtcgactggaactagagtatgaacacttagcggtctgggatagcggcatgcgctactgcgttgagccgggcgaattcctgctggaactgcgtgaatcgggtcgtaaagtatggtctggtttagttgtctgcaacacttga

SEQ ID NO: 767 - DNA, 2169 bp, Artificial Sequence
  6xHis UPI0003B0490C
atgcaccatcaccatcaccacgagaatttatacttccaggggtcgatgaaagacctggtttctacgctgaccttggaagaaaagattggccagctgatacaaattgcgccattcttctacattgagaaaatcgataagaacgtcttcggccccctgctcgatctgggcatttctgaggaagaaatttttcttactggttccgtgcttggcattaaggatgcagaagagatgattgaggttcagaaaacgtacctggaaaagagccgccacaagatcccgcttatgttcatggcagatattattcatggctacaaaacgatctttcctgtccccttggcaatggccgcggcgtttaacccgaacttagttaagaaagccgcgcgtatttctagcattgaagcacaaaccgcaggtattcatgtgacgttctctccgatggcggatctgactcgcgatccgcgctggggccgtgtcgtcgagggatttggtgaggatccgtatttaaacggcgttctggctgctagcatggtgcagggctatcagcacgatgggattgataaagaaggcaaccttgcatcgtgcgtgaaacactttgcgggctatggactgtcagaagcaggccgcgattacaatacaaccgatgtcagtcgcctgaatttgcatcagtactacttaaccggatataaaaaggcattagatgcaggtgcgcgtctcgtgatgactgctttcaatctgatcgaaggtgtcccagcgaccacgaacgcctatttactgcgcgaagtattacgggatcagtaccagttcgatggtgtcgttatcagtgactacgatagtctgaaagaaaccattgaacatggtacgagcaaagatgagaaagacgccgcacgccagggaattatcgcgggcctggacatcgaaatggcgactgctgcttactttcgcaacctgccggcgttgattcaggaaaataaagtcgatatcgcattgattgatgaggcagttttacgggtgttagagctgaaacgcgacttggggctgttcgataatccgtataaaggtgcatcggtgacgaaagcaaaacagctggttttgagcgaggcccacaaaaaggcctctttagaagttgccttagaaagcgccgtgctccttaaaaacgatggcggcactctgccgctgaaaaaagaaatgcgggttgcacttttggggaactacgcgaccagtaaagacaccattggcccctggagctggcacgggaatccgtcagataataatagcttagatgatgtgttgaacgggtatgcagcgtcgctgtacgtgaacgatacgctggaggcgcatttattggatgaaaccagcattaacgactctgatatcttagtggttgccattggcgagtctcgccgtgagtctggtgaagcgcattcgaaaacaaacatcaaactgtccaaccaacaggaacgctttatcaacgatctgaagcagtttaacaagaaaattgtgcttgttctgttcaacggacgcccgctggatctgtccggtgtgatcgaccaatctaacgcaattctggaaaccttttttctgggtacgtgctcatcggaagcgattgccatgctgctgtataacgaaaaaaacccgagcggcaaactccctatgtcatttccgcgcaatgtgggtcaggtgccaatctactacaactatctgaacacaggccgtccctacaagaacgacggtaacgaatataccagcttctatctggacgagaaaaatgatccgctgtttagcttcgggtatggtctttcgtattcgcagtttgagtttagcaacctcatcgtgaagaacgcagtcttttataagggcgaaaccttccagttctcgatcgacgttaccaatacctcggcatttgacggctacgaagtcgttcaggtgtacttgcgtgatctggttgcggaagtgagccgcccggtgaaggaactgaaagccttcaacaaggtgttcgttaaaaagaacgagaccgtgacacttgaattcctgctcgatgatgaagcattctcatacgtgcatcgtgacctgtcgtttgaaagtgatgcgggcgatttcatcctttacgtcggaaactcgtcgacatctacgttggagacgaaaattaccatgaaagagggtaaactgtga

SEQ ID NO: 768 - DNA, 1473 bp, Artificial Sequence
  6xHis UPI0003DB6EFD
atgcatcaccatcaccatcatgagaacctgtactttcagggctcaatgacaacagtacgcatgactattccagatgacttcattctgggagcagttgcatcagcgtggcagaccgaaggctggagtggcaaaaaaccgggtcaagacagctggccggatctgtggtataaaaatgatcgtcacgtgtggcacaacgggtatggaccggcggtggccacggattttattaaccggttccaagaagatgtgcagcttatgaaactggcgggcttaactcattatcgtaccagcattaactggagccgattcctgacggattacgaaaacgtgactgtcgatgaggaatatgcggcatattacgatcagctgttcgacgcgcttctcgccaatggcattaccccaatgatttgcctggaacattacgagttaccgggctacctgcttgagaaatatggtggttggggcagcaaaaccgtggtcgaactgtttgtgcgttatgctgaaaaagtctttgccaggtaccacccgaaagtcacccgctggtttacgtttaatgaacctatcgtcgtacagacccgtgtgtatctcgatgcgctgcgttggccgtacgaacaaaatacctcaacctggatgcaatggaactaccataaagtgctggcgactgcaagcgtggttaaacgctttcgcgaattaggctacccagggaccgtcggttgtattctgaacccggaagttacttatccgaggagtcgcgcaccgcacgatcttcgtgcggccgagatttatgacctcttttataaccgcatgtttctggacccactggtgcacggcgtctggcctccggaacttttagctctgctggaacagcatcaggtgacgtgggaaactagcgaagaggatcttgccgtgatccgtgaacataccgtggatgagctggggattaatctgtattaccctcaccgcgttaaagcgccgtcgcgtgcttggcatccgcacaccccgtttcatccggcttggtactacgagccatttgaattaccaggccgtcgaatgaatgcctcccgtggctgggaaatctatccgcagattatcttcgacatggcgatgcgtattaaaaacgactatcgcaacattccgtggtttgtggcggaaagcggcatgggtgttgaaaatgaaggtcagtttcggaaccgcgaaggcgtgatcgatgactcttatcgcattcgctttattagcgaacatttatggcataccctgcgcgctcgggaagcgggcgccaattgccaaggttatatgctgtgggctttcaccgataatgtaagcccgatgaacgcattcaagaatcgctatggattgatcgaaattgatctgcaaaaccatcgcgcgcgtcggccaaaagcaagcgcacattggttccgtcagcttggtgaacgccgtgaattggttctggatattgatgacgaataccgctga

SEQ ID NO: 769 - DNA, 2421 bp, Artificial Sequence
  6xHis UPI0003ED0A8E
atgcaccatcatcaccaccacgaaaacctgtactttcagggtagcatgaccgcaatttacaaagacgcgggtcgtccagtccatgaacgcgtagcggacctcttggcgcgcatgacaccggaagaaaaatttgcgcagatgcacgcatattggttgattctggatgagaacggcaatcaccgcgaacggagcgatctctcggacgaattcgctggtgtctcggaacaggccgcactcagtgagcgactcaagttaggggttggacaaattactcgtccgctcggcacccatatcgttgatgcaaaaacaggcgtaagagcagcaaaccgcctgcagagaatgatgatggaagagactcgtttgggtatccctgccctgttccacgaagaatgcctggtgggtctgctctgtaaagatgcaaccctttttccgtcctctctgaactatggtagcacttgggatccggaactggtccagagggcggctgaacagattggtaaagaagcacgatcagtcggttgtcagcaaggactagcccctgttttagatgtgtctcgtgatgtccgatggggacgcactgaggaaacctttggcgaagatccgtggttggtgggagttatggtcaccgcatatgtcaagggcctccaaggtgataaacgcgatctgttagcgacactgaaacactacgtgggccattcatttagcgaaggtgcccgcaatcatgctccggtacatctgggcttcagcgaactgaatgatacgtttctgctgccttttgagatggcggtaaaactggccaatgcgggctcggttatgcccgcttatcatgacatcgataaccagccgggccatagcgatagtttcttattaactacagtgctgcgagagcaatggggtttcgatggcatcatcgtggcggactatggcggagtatcgctgctccatcagcatcacggaatttcacatgatgcggcggagtcggctgctttagcctttaatgccggcctggatgtagaattgccgaaagatgactgtgcgcgccacttggcggatgccgttgaacgtggcctcatttctatgaccaaagtagacgagatagtggctcgtgttctgaccgaaaagttccgcctgggattatttgaaaagccgtatgcagacgaaaatggtattgatcttcagaacgatctgactcgccaagcggcacgcgaagtagcgaccaaaagcgtgacgctgttggaaaacaatggaatcttaccgcttggaggtaaaccgcgagtggccgtggtaggcccaaccgcggacgatccgctggcgcttttgagcgggtatagcttccccgtgcatttgatcatctctgatatggttgaagagaccctgcaagttacgaccccgcgcgcagcgcttgaacaatatttaggagccagcaacgtgcgctatgcgaagggctgtcacatcatcgaaaaacgcatggcgggcgcaccggtgtttccaggtgattcagggtccaaacccatgcagcagagccctgtatcacaatcgacggcgctgattccggaagcggtcaacgccgcgcaagaatcggatgttgtagtcgcatgtgtaggtgatctggcgggactgttccagtcgggcacagttggtgaaggctcggacaccgatagtctgaatttgccgggcgttcagcaacaattgctggaggcactggtcgcaaccggtaaacctgttattgttgttatgaccggtggtcgtccctacaatctgcagggcttggaagataacgttgccgcactactcatggcgtgggccccaggtcaggaaggtggatgggctattgcggatgttttaaccggtcgtgctgaaccgcagggtcgccttgtagtatcggttccgaaatcagcgggagccatgccgtactactataatcacaaattaaaatccggtggcacaccgtttgcattccactttggtagtcgttacccttttggctttggcctaggttggaccacatttagctggggtgccgcgcgtgtagccgagtcgagcgtgccagtggatggtgaggtgacgttgagtgtagatattaccaatacgggcgaacgtagcggctcggaggtagtgcaggtttacgtccgcgataaagtagccacgcaagtacgtagtttacaggagctgaaagcatttcagcgcgtgaccttgtcaccaggtgagactgctactctttcgttcacgctgccagtagaaatgtttaacttcacccgccgcgatggtaaacggattgttgaaccgggtgagttcgagctgcaggtcggcgctagcagcgccgatattcgcgagcgcgtaaccgttcgtgtcacgggagaaactcgtgtactgccggcggaatggcgtatgctgtcaacgtgcaaagttacccgcgcttga

SEQ ID NO: 770 - DNA, 2634 bp, Artificial Sequence
  6xHis UPI00045BB507
atgcatcaccaccatcaccacgaaaatttgtattttcagggttctatggcacctcgtcccttcaaaccacttgacgtggaggatgtgatcagcaaactgtcgctgaatgaaaaaacccgtttactggccgggattgataactggcacacgtacccggttccgcgcctcggcgttccgagcctacgttttaccgacggccctaacggtgcacgtggcaccaagttttttgaaggcgtgccggctgcgtgctttcctgctgcgacgggtctaggcagcagctgggacccagagtttattcaaaaagttggccaggcgattggtcgtgattgcaaagacaagggttgtcatgttctgctcggcccgacgattaatatccagcgtagcccgttgggaggtcgtggtttcgaaagctactctgaagatccgctactgtccggcactttggcccgcgcttttattaagggtgtgcagagtgagggagttagcgcgaccatcaaacattatgtgactaacgatagtgaatttgaacgaatgtcgatgtcgagcgagctgtccacccgcgcactgagggagatttacctgcgtccgtttgaactggcctgtcgcgacccggaaactgctccctgggccgtgatgaccgcctacaaccgtgtgaatggcctccatgcatcggaaaacaaatatttgctggattcagtgctacgtaaacagtgggggtgggaaggtatgatcatgagcgattggtatggaacctacagcgccgacgcgagcattaaagcaggtctggatctcgaaatgccgggccccccgacttggcgtgcggatgctctgcaacgttgtgtagtggcgcagaaaattcgagtaccggagattgacgctcgtgtgcgtgaggtattaaaactgataaaccgtgtcgccgtatcaggtatcccggagaacgcggacgaaacgggcgaaccgaaaccggaaaccattgatcttctacgtcaggcggcggctcatgcgaacgtgttgctcaaaaattctgaatcgctgttgcctatcagcgcgaaagatgtggcatcgatcgccgttattggcccaaatgcagactccccagtttttagtggcggaggtagtgccaacttacgcccatataagcatacgaccgctctagagggaattgccgcggcgttacaggatgcaggcaataaagttgaagtgcagcatactattggcgcccatgcccacaaagaagcacccctgctgggcgttaaacatctgaaaaccaaagcaggcgagccaggctatgatattgagtggttcaatgaagacccggtgcaaaatccggatgccaagcgtgtccattatactcatgggaccacgtcgtttgccttttttaacgataatctgccaggtgacgatgtgcttcatcaggaatgctgggccaccatgacggcaatcttcactccggaagttacgggcaaatatgagtttggagcagctgccaccgggctggtggatgtgtatgtggatggtaaaaaaatcatcgataactcaagcaatccggtgccgggtcacgtcttttttatgaccggaaccgtagaagttctgaacactgttgaactgaccgcgggcaaaccggcggagattaagttgcaatttgcgtcaccagtggcggcccgtacaaagggttttacgcagattggtgctggcagcctgtcactggagggtcgagggggctgtcgttggggcggtggccgtacttttgaagatgaccagggaattaaagaggcggttgatctggcgaaaaaagtcgacaaagttgttttggtagtaggcctgaataacgattgggaatcggagggttacgaccgggataacatggagttaccgcgtgcgacgaaccgactggtatcggcagttttagaagtgaacaaaaatacggcagttgtgattatatcaggcacccccgtagcaatgccgtgggcagagtccgcctcgactattgtgcaatcattttattctggtggggaagcgggtaatggcctggctgatgtgttatttggcaaggtcaaccccagctcacgcctgccgctgaccttcccggttagagatgaagacaccccatcacacctgaatttcccggggcagaatgggaaagttctgtatgccgaaggggtgttcgtgggttaccgccattatttaacctacaagaaaaaggtgctgtttccttttgggtacggcctgagctacacccagttcgagcactctgacctcaagttgagcggcgaaattggcaaagatagcaccgtgaaggtgagcgttaccgtcaaaaacaccggtaaagttgcgggacgtgatgtagtacagatttacgtccgtgatctggttagtcgcctggatcgccccgtgaaagaactcaagggattcgccaaatccagcctcttagaaccaggcaaatctgaaaccgtcactattacactggataaatacgcctttggatatttcgatgactgggcaggcgaaggccgcgatggtgaaggcctgtgggtggcagaggccggtgattttgagattgtggccgccagcactagcgaagatgtcggtatcagcgcaggcattagtctgaaacaaagcttcgaatggctgtga

SEQ ID NO: 771 - DNA, 1455 bp, Artificial Sequence
  6xHis UPI0000072C73
atgcaccaccaccatcaccatgaaaacctgtatttccaggggagtatggcctttcctgcgggttttggttgggcagcggcaaccgccgcctaccaagtggaaggaggttgggatgcggatggtaaaggcccgtgtgtgtgggacacttttactcaccagggcggcgaacgtgtgtttaaaaaccagaccggcgacgttgcatgcggttcgtacaccttatgggaggaagatctgaaatgcattaaacagctgggcttaacgcactatcgcttttctctgtcgtggagtcgtctgttaccagacggcactaccggctttattaaccagaaagggatcgactactacaacaagattatcgacgacctgcttaagaacggcgttacaccgatcgtgacgctgtaccattttgatctgccgcagacgttagaggatcagggtggctggctttcagaagccatcatcgaaagcttcgacaaatatgcgcaattctgtttttcaaccttcggcgaccgcgtaaagcaatggattaccattaacgaagcgaatgtgctgtcggtgatgtcttatgatctaggtatgtttccgccggggatcccgcattttggtacgggtggttatcaagcggcgcataatctgattaaggcccacgcccgtagttggcactcttatgactcactgtttcgtaaaaagcaaaaaggtatggtgagcctcagcctgttcgcggtatggctggaaccggcggatccgaattcagtatcagatcaggaagcggccaaacgcgcgatcacctttcacttagatctgtttgcgaaaccgatctttattgatggcgactatcctgaagtcgttaaatcccagattgcgagcatgtcgcagaaacaaggctacccgtcaagccgtctgccggaattcacggaagaagaaaagaaaatgatcaagggcacggcggactttttcgctgtgcagtattacactactcgtctgatcaaataccaggaaaataaaaaaggcgaactgggcattttacaggacgcggaaatcgaattttttccggacccctcgtggaaaaacgtggactggatttatgttgtgccttggggcgtgtgcaaactgctgaaatacatcaaagacacgtacaacaacccggttatttacatcacagaaaacggtttcccgcagagcgacccggcgccgttagacgatacacagcgttgggaatattttcgccagaccttccaggaattattcaaagccattcagctggacaaagttaatctccaggtgtattgtgcgtggagcctactggataacttcgaatggaatcaggggtatagttctcgttttggcctgttccatgttgactttgaagatccggcccgcccccgagttccttacacctcggcgaaggaatacgcgaaaattattcgtaataatggattggaagcccatctgtga

SEQ ID NO: 772 - DNA, 1503 bp, Artificial Sequence
  6xHis UPI0000DD5304
atgcaccatcatcatcaccatgagaacctgtactttcaggggagtatgccggcaggtcttctgattagctcggccggattaggctctccgccttcagctaaacaaccttgctgtcgtccgggcaccagcatcaaaaaaggccaccaaatgacggaacacgaattgcagccctttcctaaaggcttcctttggggtgcagcaacaagcagctatcagattgaaggcgcatggaacgaagatggcaaaggcgaaagcatttgggatcggtttacgcgtattccaggtaagattaaaaatggcgattcgggagatgtggcgtgcgaccattatcaccgttatgagcaggatttggatcttatgcgtcagctggggctcaagacctatcgtttctcgattgcctgggcgcgcattcaaccggatagctcgcgtcagattaaccagcgcggtctggacttttatcgccgcttggtagaggggcttcacaaaagggatattcttccgatggccacgttataccactgggatttaccgcagtgggtggaagatgagggtggctggttgagccgtgaaagcgcctcacgctttgccgaatatacccatgcactggtggcggcattgggtgatcaaatccctctgtgggttacacataatgaaccgatggtgaccgtgtgggccggttatcacatgggtctgttcgccccaggtctgaaagatccgacgctgggcgggcgtgttgcacatcatcttttactgagtcacggccaggcacttcaggcgtttcgtgcactaagccccgccggttctcagatgggtattaccctcaattttaacaccatttacccggtttcagcggagcccgcagatgttgaagcagcacgccggatgcacagcttccaaaacgaactgtttctggaaccattaattcgtggccaatacaatcaagccacgctgatggcttacccaaatctgccagagttcatcgccccggaagacatgcaaactattagcgcaccgatcgatttcctgggcgttaactattacaatccgatgcgcgtgaaatctagcccacagccgccgggtattgaagtggtccaggtggaaagtccggtgaccgctatgggctgggaaatcgcgccggagggtctgtatgatttgttgatgggcatcacgcggacgtatggtaagctgcccatttatattaccgaaaacggtgcagcgtttgacgatcagccagatcagagcgggcaggtgaatgatccgcagcgtgttggctatttccaaggtcatataggtgccgcgcgccgcgcgttggccgacggtgtggatctgcgcggttattatgcctggagcctgctggacaatttcgaatgggcggaggggtacagtaaacgctttggcatcatatacgttgactttgagacacagcaacgtaccttaaagcagagcgcacaatggtaccgcgatgttattgcacgtaacggactagctgcgcccgcaatttga

SEQ ID NO: 773 - DNA, 2409 bp, Artificial Sequence
  6xHis UPI0002CA9E4F
atgcatcatcaccaccaccatgaaaacctgtatttccaaggttcaatgatgaaggctagctacctggacccgaaacagccggtcgagaagaaggtagagaatctgctggcgcagatgacgatcgaagagaagatcgcccaactgtcaggtatttgggtatacgaaattctggatgatatgatgaaattttcttatgaaaaagcgaatcgcctgatgactcatggcatcggccagattacccgcttgggcggcgcatcgaatctgagcccgcaggagaccgtgaaaattgcgaaccagattcagaagtatttagtggagaacacccggctgggcattcccgctctgattcatgaggaaagctgttctggttatatggctaaaggcgcgaccatttttcctcagaccattggcgtagcgtcaatctggaaccctaaattggtggagaaaatggcgagtgttatacgtgaacagatgaaagcagtgggtgcacgccaagcactagcaccgcttctggacgttacgcgagacccgaggtggggccgcactgaagaaacattcggggaagatccgtatcttgttatgcacatgggtgttagctacattcgcggattgcagacggaaaatctcaaagaaggagttatcgcaacgggcaaacatttcgtgggatacggtaatagtgaaggcggaatgaattgggccccggcacatatcccgatgcgcgaactttacgagatctttctttacccatttgaagctgcggtaaaggaagccaacttaggttcagtgatgccaggttaccacgaattagatggcataccgtgccataaaagcaaacagttactgacggatattctgcgcaaggattggggcttcgatgggattgtagtttccgactattttgcgatcaaccagctgtacgagtatcaccgtttagcaagcaataaaaaagaagccgcgaaactcgcgcttgaagccggtgtagatgtggaattgccgagcactgattgttatgggctgccgattaaggagttgattgaacagggcgacattgatatcgatttcgtaaacgatgccgtccgccgcatactgaaagctaagtttctgctgggcttatttgaaaatccgtatgtggacgagaaacgcgtcgtcgaaatttttgacacgcaggagcagcgtcagcttgcgtataaaattgcccaggagagtatcgttctactgaaaaacgaaagtaaccttctccccctgaaaaaagatttgcagagtattgcggtgatcggtccgaacgcagacaacatccgcaatatgattggtgattatgcgtatccttgccatattgaaagcctgctggagatgcgtgagaaagataacgttttcaataccccgcttcctgaaggcctggaagcgaaagacatctatgttccgattgtctccgtgttgcaaggcattaaagaaaaagttagcccgaaaaccaaagtcatctacgcaaaaggctgcgatgtgatttcagacgataccgcgggtttcaacaaggcaatcgagattgccaaacaggccgatgtggccattgtagtggtaggcgatcgcgcgggcttgaccgatggctgcactagtggtgaaagccgtgaccgtgcagatctgaatttgccgggagtccaggagcaacttgttaaagccatctacgaaactggcacccctgtcgttgtggtgctgattaatggccgtccgatgtcaatttcttggcttgcagaaaagatcccagccattattgaagcgtggctgcccggcgaagagggtggccgcgccattgcggacgtcatttttggcgactacaacccaggtggtaaactcccaattagcattccgtgcagcgtgggccagttgccggtttactattatcataaaccgagcggcggccggacgaactggaagggtgactatgtcgagtcaagcacgaaaccgctatacccctttgggtatggcctgtcgtacaccgagtttctatactcgaacttgtccatcagtcacccgaaagtgtcaacacagggcggcatcatagaaatctcggccgacgtcaagaatattggcaaagtaaaaggcgacgaggttgtgcaactgtacatccaccgcgaatttctaagtgttacccgtccggtcaaagaactgaagggctttaaacgtattacgctgggtgtgggggaacagaaaacggttattttccaactgagctccgagcagctgggtttttacaacgaagaaatggaatatgtagttgaacctggtcgtgttgaggtaatgattggcagttcaagtgaagatattcgcctgttcgggagcttcgagatagtgggtgaggtgaaaaaaaccgacaaaaaatttatgacccaggttcgcgtagagaacaaactgtga

SEQ ID NO: 774 - DNA, 1458 bp, Artificial Sequence
  6xHis UPI0000E297D8
atgcatcatcatcatcaccatgaaaatctgtatttccagggctctatgtctcgtcatcgtttacttttagcactgccactgctggtagccgcatgcagcgagtcttcacgtttcgaacctgatgcggcacgtaccgccctgatcggcaccggcctgccggctggatttctgctgggcactagcacttcgtcccaccaagttgagggcggcaatacaaatgattggacacgctgggaacaagaacgtttcccggatggacgtcctcatattaaagacgagcgccccagcggtgaagccacggatagctggaatcgttttggagaggatgtgcgtgcaatgcaagttttgggcgccaatgcataccgctttggtctggaatggtcacgtctggagccgacccccggtgcatggaacgctgaagccgccgaacgttatcgtcaatgggcccgttcactgcgtcaacaaggcattaccccgctcgttactctgtaccactttactctccccctttgggtttcagatgcgggtggttgggaaaacccggccacactggaagcatttgaagcttatgccgcacgtgtagcggaggcgctgggcggagaagtggattggtggtgcaccgtcaacgaacctaacgtatatgccattcagggttatctggatggcatttggcctccgggcaaaaaagacacgcgagcaatggcggcagtattagatcgtctgattgaagcccacgcacgcgccgcgcgccaactgcgtgccctggatactgttgatgcggatggcgacggtcatgcaactcgcatcggactggcgcaccacgcgcgcatatttcaagccgctacgggcagcatggcggatgtcgcggcgaccgcgttaaccgatgcctttgtaaatgagagtgtcccagaagctctgcgtacaggtcgcattcgcttatcggtgcctggctccacctctatcgatcgtgaagttgaaggcttaaaaggctcgattgattacttcgggttgaattactacacgcgtgattacatccgtcaggatttaggcgaggcgagcttggcacgccaatacaccccgcgaggtaaaaccgttaatgatctcggatgggaactctatccggagggcttgtatctgttcctgcagcgctatgggacccttggcgtcccgattctggtaactgaaaacggcatggccgatcgctccggcgaacgtcggccgcgctatttgcagacacatctgtacgcggtagaacaggcgattgcggaaggtgtggatgttcgcggttatttccattggtccctgatagacaacttcgaatgggcagagggttatgagcctaagttcggcctttttgcagttgatgtcaattccccggaaaaatcgcgtaccgaaacgccgagtgtgcgcaccttccaagatatcgctcgcaatttaggtctgaccccgtctccatga

SEQ ID NO: 775 - DNA, 2241 bp, Artificial Sequence
  6xHis UPI00006676B1
atgcatcatcatcaccaccatgagaatctgtattttcagggatctatgcatgcgaaacgtctttcagcggctctcctgagtgcaagtctctgcgtttttagtcacgctgccgaaaatggtgcgccaagcaaggactttgcgtttcaagacgactcagccctgcgccgggcagacatgttggtacggcagatgacgctggatgaaaaactgcaacttatccattctaaataccagatgagcgacgttccaggaggtggggcggggtttatccagggcattccacgtctccgcatccctgatctgaacatggttgattcagccactggaagcgggagcacttcacagccgagcactactttccctgcgacaatcggactggcggcatcctgggacaaacgtctgtcgtacgcgtttggggcagttattgcggaccagcttcgggcacaaggctttgccatggggttaggcgggggcactaacttagcacgggaaccccgtggtggccgcctgttcgaatatttaggtgaggatcctgtgctggccggtgagatgctggcggcccgtacccgcgggacgcaagatcgcaaagttatcgcaacaattaagcattacgttggcaacgaacaagaaaccaaccgcatggggggcaatgatcagatcgatgaacgtaccttacgtgaactgtatctgttaccatttgaaatcgcgatgcagactgcacgcccgggcaacgtgatgtgctcctataatcgtgtgaacggtgattatgcctgtgaaaacacccacgtgctgaccgatgtactgaaaaacgagtggcgtttccagggacaagtgcagtcagactggggtgcggctcatagcactgccaaagcgattaatgcggggcttgatgaagaagaagatgttggccctactgtgtttctgactccggacctggtgaagcaagccttggctaacagggaaattacccctgcacgtttagatgatatggctcgccgtaaattatatgccatgattcgtaccggtgtgatggatgacccgccgcgcggtggaggcactattgatttcgcggcggcaaatcgcttcgcccagtatgcggctgaacagtctattgttctactaaaaaatcaggaccgccagttacctctggatagcgcctccttacgtcgcatcgcggtgattggaggccatgcagatgcagcggtactgaccggtgggggctcaggaaatacgcgacatccggttactggggcgtttgccggttgcggtggcttgacttttcctaccaccaccggttgcaactggtggccaaacccgtggcttaagctggatgtccccatcgtgcaggcgatccgtaatttagcgcctggagcggctgtagcgttcgccggaaatagcgaccaacaaagcccatttgcagcttacacacagcagcagattgatgccgcagttgacctggctcgtcggagcgatgtggcaattgtatttgtaacccaggcagcgggagaagactttggcgaattgcgttcgttagcattggcaaatccgacgaaccaagatgcgctcgttcaggcggttgctcaggcgaatccgcgtgtaattgtggtcgtggaaagtggcaaccctgttttaatgccttggcgcgatcaagtaagtgctatagtccaagcatggttccctggcgaaggagggggtaatgcgatagcaaatgtgttatttggcaaagtaaatccgagcggcaaactgccagtgacctttccagcgcgtgacgaagatacaccgacctggggagccgatggcaccctgtctcctaaccctgtgtacagtgagaagctaaaaatcggctatcgctggtatgatgccaaccgcattgcgccgatgtttccgttcggccatggtttgagctacacacacttctcctactcgcgcttagaagttaaacaacgtgccgatgcaacgaccacggttagcttcaccctgaccaatgatggtccggtagctggggccgaggtaccgcaggtgtacctgggtgaccttgatgatccgcaggaacctccgaagcgcttagttggctgggataaagtaggactccgcgccggtgaagcgcgtcgtgtacgtatcgtgattccggcagaaatgcgtcgcgtctgggatacccaccgtaatggctggacgttagctaagggtggtcgaatctatgtgggtgcctcatcccgtgatattcgcttacagcagccgtga

SEQ ID NO: 776 - DNA, 2229 bp, Artificial Sequence
  6xHis UPI0000426E8F
atgcaccatcatcaccaccacgaaaacctgtattttcaaggttcaatgtcaaccgtctatcgagatgcaactttaccgattgaagcgcgcattgatgatttactgagtcagatgacgctagccgaaaaagttggtcagctgtgccagcagccgatgcttgattaccagcaacatcgtgatgactatcttgcaggggtcagagcgggtcgctggggttcacgcattcttgcagatacagcgtgggctggaaacgcgccgggggaaaatgtagatccgtgtcagttgaacgagattcagcgtgcggctgttgaacatagccgtttaggtatcccgcttttgtttgcgcgcgatgttatttacgggcaggcgaccgtacttccgatcccactggctcaagccgcgtcttggaacccggagttagtgcaacaagcgtatcgtgttatcgcccgtgaagcagcgtcgttaggcattcattggacgtttgcccccatgctggatattgcgcgtgatcctcgttggggtcgtacgatcgaaacaagtggcgaagacccgtggttaacagcccagtttgccgcggccgttgttaaaggctttcagggcgacgatctgtcagccgcagattcgctgatggcgtgtgcaaaacatttcgtggggtatgcggccgtcgaaggcggtcgcgattacgacacgaccgaactctccgacaacaccttgcataacgtgcaccttccgccattccaggcggccatcgaagcgggggtaggttcagttatgacgggtttttgcgacctgggcggaaccccggtcacagcccacggcgaacttattcgtggctggcttaagcagcagcaaaatttcgacggtctggtaattagcgactggggctcaattgctgatctcacccatttcggtattgcccaggatgcgttgcgtgcagccgaattagcactgcaagcaggtgtagatatggcaatgacacacgaagcgtatgaagataaattggaccaactggtgctgcaagggcgtatcaaggaagcccttctcgatgatgctgtacgtcgtgtgctgcgtgcgaagtttcgatgtgggttatttgaacgcccgtatgtggacgaagaatggcacaaacgcgaactgcggcgtccggaacatttagctctggcgcagcgtcttgccgaacagtcgattgtgctgctgaaaaaccgacaggcattgcttcccatctcgcgcaccagcgttccgttaaccttggcagttataggcccacacgcacactcccagcgccaacatttaggcagttggtgcctggatggagatgctgatcaggttatgagcatctaccaaagcctgtgtgctattgcgggtgaggttaaagtgattacggaacaaagctgttttagcgatgagatgattgaatgtgcccaccgcgccgatatcgttattttatgtacaggcgaaagccatcgtcgcactggagaagcgcgtaatatcgccgagttgcagctgccgccgggccaggaggaactgattgctgccgttgggcgcacgggtaaacctttagttgtgattcagtgcacaggccgccctttacccagcccggcgaccgagcagtacgcagacgccttattatatggttggcaatgcggtagcgaggcgggaaaagccattgcccgcattattttcggcgaacaggtgccgtgcggtaagctgccaatgactgtcccgcgtagcaccggtcaaattccgatttattacgggcgcaaacccttgggtaagatgcgcgattatcgtgaatatcagccgtacaaagatctggcggatacccctctgtacccgtttggttttggtttatcctacaccaggttcacttattcggacctgcaactgtcacatgaaagtttggaattaggagcgagcctccgtgtaacaatgaccgttaccaatgatggggcggttgcgggagatgaagttgtgcaatgttacattcgtcaatatgtggcgagcacaacccgtccgcagcgtgaactcaaaggcttccaacgtatttcactgcagccgggcgaatcaggtgaagtgtctttcacacttggagtgcgtgagcttgccttttacggccagcatcgccgctacgcgcaagagccgagccgcattagcgtttttgttggcggtgattccaccacaccccaccaggcggattttacgctgttcgaaaatttatacaccgtctga

SEQ ID NO: 777 - DNA, 2151 bp, Artificial Sequence
  6xHis UPI00032BF71F
atgcaccatcatcaccaccacgaaaacctgtattttcagggtagcatgggcgtagcagccaccattaaacatttcgtggcgaacgaacaagaaacagcgcgtatgtcagttgatgagactatttctgagcgtgcgctgcgtgaaatttatctccgcccgtttgagattgccgttaaagaagcaaaaccgtgggcgctcatgaccgcctacaataaggtaaatggtacacattgcgattctcatgaatggctcctggcagaagtgcttcgcggagaatggggttggaaaggcttagtgatgtcggattggggaggtaccaacagtctggctggcggcttaaaagcgggattagatcttgagatgccgggtcctccgcgtgtgcgtaaggtggatgccgtcctggaagcaatcaaagcgggcgaagtgtccgaatcggtaattgacgatcgtgcacgtggtgtactggagttcttagagaaattaaacgcatttggaaaaacggcgtcgaccacggagcgcgcgatcgataaacccgaacatcgaaagttgatccgcgatgcaggcagccgaggcattgtgttactcaaaaacgaaggtgccattctaccgctgacgaaagataaagttaatggcaaaaagattgcactggtgggacttgccaaagacgcattggcacatgggggcggcagcgcaggcgtaaatgcgcactacaaggtgactccatgggatgcgctgaatagcgcgctcggcgatagtgttgagtttacctacgcaaaaggcgtggataaagcccggctgcttccaccaattagcaaagacggtacttcgggctcggtcattggtttagacggcgaaaatggctttacgcgtatcctgtacgatgtaaactcgccggataccccagatagcaccctgcatggcttcgctttatcggcgtactcaccgctgggaagccaggaaagcctgtggaagatcctcgaaattgtcggggacttcaccccggcggagacggggaatcattatattgcgtgttctggaataggctcgacccaggtgtttattaacgatgataaaatctttgagcaggaaggtaactgtactgatcctatgggtgccctatttggcgctatgacggaggaagaatttacttatgcttttacggcaggcaccacctaccgtattcgtattcgaactatcccgccgactaatgttggctcaaaaatcttagaagggcgcagcggcgtccgcatgggttttagcttggccagcattcatgatgccgacctggaaggcgaagccgtccgcgtggctaaagatgctgacctggcgattgtctttaccggtcacgatccgcagtgggaaaccgaaggccgtgaccaggatagctttcacttaccccgtcagggctcacaagattcgctgattaccgcggtcgcaaaagcgaacaggaacacgattgttgttaacagcactggggtggccgtagcaatgccgtggctggaagaagttccggccctgttacagacttggttccctggtcaggaatgcggaaatgccattgcagatgtgctgaccggcgctttaaacccggaaggtcacttgcccgtcacatttccgaaacgactggaagatgcgccggcatacggcaactttccgggtgactatgtacaaggacagttgaaggttcaatacgccgaaggagtgtttatcggttaccgccattacgatcgcctgacacgcgacaaagtgaactttccatttgggtatggcctgtcatatactgattttgaagtagagggcgcgaaaatcacggagcactccaaggatggctataccgtggcggcgactattcagaataccggccgtcagccgggtggcatggtgttacaagtatacgcgggtaaaacagatacgtccgtcgatcatccgctgaaagtgctggtagcttttcagaaagtccgcctgtctccgggagagagacaggtagtacaactgcctgtgcgtcttcgcgatctggcctactttgacgagaaatcgcatggctggactgcggaggcgggccagtacaaactatactttggcaccagcgcggccgatattctgcagacgattccgatcacgattgacgaacgcctgagtttcggtctgtga

SEQ ID NO: 778 - DNA, 2676 bp, Artificial Sequence
  6xHis UPI00035213C2
atgcatcatcaccaccaccatgaaaacttatattttcagggcagtatgaccgcgaatattgatatagatgcggtgttacaatccctgacccttgaagaaaaaattactctgttagcgggtaagtcattctgggatacggcggccataccctccaaaggcgtgcccagtgtgattttcacggatggcccaaatggtacccgcggcgttagaatcgatggaagcactaaagcagcgtgcttcccggcggcagttggtttagcgtctacttttgatggagatattgcacataacattggtgtggcgctggctgaagaggcaggcaccaagggcgcccggtgcttattagctcctaccgtgtgcattcagcggcatcctttaggtggacgtaactttgagacatatagtgaggacccatttctgagcggcagcatggcacatcgcatgatttccggcattcaggcgagtggaaacgttgttgccaccattaaacatttcgttgcgaacgaacaggaatcatgccgcacgaccagtgacagccgcatgtctgaacgtaccctgcgtgagatttatttgcgtccgttcgagattgcgattaagtcagaaaatccaccttacgctgtcatgacctcgtataatcgcgtcaacggcacccatgcagatggcaaaaaacgcttgatcgaagagatcctgcgaggcgaatggggctggcgtggtctggtgatgtccgattggggcggaaccaattcggtgggccaagccttagaagcgggtctggatttagaaatgcctggcccgccgcgcaaacgtaccattccggcggtcttagatgccatcaaagccggtacagtgagtgtggacacaatcgatacacgtgcgcgggccattctggaatttattgagcgcgtgggcggatgggacaacacagaaccttcgagttcggaaggtgcactggaccgcccggaacatagacgtttaattcgtgatgcaggatcgcgcggtattgttatgctaaaaaatgccaataaaattcttccgctgagcacggcgggtgcccctaaaactatcgctctgattgggctggccaaagacgccttagcgcatggaggtggctcggcatctgttaatccgcactataagatttctccgtgggagggccttcgtgaagccttgggcgacaaatgccgcttcatctacgcaaaaggaacccgtcgcctgcggctgttaccgccgctgcgtgtcttagcggaaaaagggggcgtgccagataccagtgatgacccgaatcccgataccaaaccaggtggcacagtgcacggacttgatggtaaaccgggttttacgatcattttccatgacgcagatgcggatggtcaactggttaaaggcgcgaaaccgaaagtcatccacggccatcctatgtcggcctttagtcccttgggtaacctgggtagcgagaataaagtggtggaaattgttggtgacttcgttcctaaagaatcgggctcacattgcctgtcctgcagtggcatcggacccgcgcagatgtttatcaacgacaatttggttctggatcagacgacgaattctccggacccgatgggagcactgttctcagctaataccgaaccagaaatttgtcatgcgtttgaagccggagaaacttaccgtttgcgtatctgtacccggccgcctaccaatatggcggcaagcggtttaagcttcctggaaggtcgtagcggtgtgcgactgggatttgtgctagcgagtgaccgcgacaaccagtcagcgcttttaaccgaagcggccgatgctgcggcagccgcggatgtgtcaattgtgttcaccggtcatgatccacagtgggaaaccgagggtcgtgatcaagacagttttaatttgcctttggcacagaatgaactggtggccactgtagcaaaagccgcaccagccggcaaaacagtcgtcgtgaactgtacaggaacgccagtagctatgccgtggctctcggacgtaggggcggtactgcaagcgtggtttctggggcaagaatgtggacgtgctattgcggacgtcattaccggtgcgatgaacccggaaggtcatctgccagtgtctttcccgcgccgtttggaagatgccccagcgtacggcaattttggagccgaactgaccgatccggaacctgtggtcgattacgcggaaggcgtttttgtgggttaccggttttatgatcagaaaccggcgagcgccctcaattttccgttcggccacggcttgtcgtacaccacatttagcgtgggcagcattgacgttgcgtttaacgatacggaagctactgtttccgtacgggcgtcaatcacaaacaccggctcagtgttcggcggtgtagcgcttcaattgtacgccggtcgtagtgatgcggtacctgcgccgtcagcaccggatctcccggtgaaggccttggtggcgtttaaaaaagtgcgcctgagccccggcgcctcacaagaagtagtgctggaggtccccctgcgtaaccttgcgtatttcgatgacgttaagagccagcaatggttagtggacccgggaaactacaaactgagtttcgggttcagcgcgaccgacattcgacagtctagtaacctgtgtctggaccgcctgtttagtttcggtaagtga

SEQ ID NO: 779 - DNA, 2490 bp, Artificial Sequence
  6xHis UPI0003B117B7
atgcatcatcaccatcaccacgagaacctgtattttcaaggctcaatggtgtcgaaaatgagtctggccgagaaaattaacatcacaacgggcaccggttggcagatgggtccttgtgttggtaacacaggcagtgcagattcggttggatttccgggtttgtgcttacaggatgggccgttaggggtgcgtttcgctgacagcgtgaccgttttccctgcgggtattactgtagcctcgacgtgggatcgcgaccttatgttcaaacgtggtcaggcgttaggtgcggagatgcgcggcaaaggcgtcaacgtcatgttagggcctgcaatgatggggaaccgcatgccggcgggcgggcgcaattgggaaggttttggagcagaccctgtcctatcaggtgtagcggtgggtgagactgtgaaggggatccaaggtgaaggcgtaatcgcgtgcgcaaaacattacatcggaaacgagcaggagatttttcgtcaggcggtagaggctcgtggccaaaactgggcggtcgatgaagcgatcagtgcaaacattggtggtcgtgcactgcgcgaaatttacgcctggccgtttatggatgctgttgaatctggtgtggggtctgtgatgtgcagctacaatcagatcaacaattcgtatgcgtgtcagaactcctacctgttgaacggactgctaaaagatgaaatgaacttccagggttttgtagtgagtgattggattgcgcagcgtagtggcgttgcgagtgctcttgccggtctggatatgaccatgccgggcgatggccgggtttttgcagatggtggatcatattgggggtccgaactgaccactgcggtgttgaacagctccgtgccgctgtcacgcgtggacgatatggcgctacgcatcgtagccgcatggtacagtatggggcaagactcgtcaagctatccacgcccgaactttagttcgtggtttcgcttaccacaaggcccgcagtatttcggatctgacgacattggaaaaaaggcgggaattacaattaacaattatacaaacgtgaagtctaaccatagctccctggcacggcagattgcggccgaaagcattgtgctcttaaaaaatacgaataatacgctgccgttcggtagtggaagtaatgcgcgtcgtagcttgatggtacttggtgaaggtgcaatgggcaacaagaacggagtgaactcgtgcatcgatcgcggctgcaacgatggcactctgggtcaaggctggggcagcggttccgttgaatatagcagcttctacagtcctttagaagcgattcaagaaaaggcgcgtgaggacggcaccctagtgtcctacgttaccagtgaagcggaccacaatcgcatttacgcgactgtcgcgagctacccgaatagcacatgcattgtgttcgccagcgccgatagcggagagggatacctagcagcggagggtcatcacggcgatcgtaacgatctgaaattgtggcacaatggagatcgcctcattcaaggcgtggcgagtatgtgcaaagataccgtcgtagttattcatgccgttggtccagtagatatggaatctttcattgagcaccctaacgtgacggcggtagtccttgcaaacctgccgggccaggaagccggttcttccctcaccgacgttctctggggcggcgtgaatcccagtggccgtctgccatataccatcggccgtcgtctggcagattacggcccgggcggtcaagtaatgtatactccgaaccacccgattccgcagcaggactttgacgaaggactctatattgactatcgacattttgacaaatttaacattattccacgcttcgatttcggctttggcatgagttacacgaccttcgaattctccgatattaacattgaagtggttaaaacaccgaccgaatttctgccgactcgcaatggcacggtacagccgcctaaaatcaactcgaccattccagacgccaaggaaatgctgttcccggctgatattacacagatccacaaatatgtgtatccgtacctgtcatcctcaagtggcattacccgtgataataccccgcagccaagtgcatcaacacgcagcttagtagacacggataaactgttcacctcattgctgaaagtccgtgcaaaagtgaaaaataacggtgccgtagccggtaaagcagtagcacaactgtatatgtcttatccgaactctacgggtgtggattttccagtccaggtcttaagaggctttgtgaaagtgcaagttgaagttaatcagaccgtggatgtaagtttcgacctcatgtggcgcgatctgggctactatgatgaagagaaaggagcctggagactcccggtggaagggggtaaatgggggggctacaagttcatggtaaagtcaagcagccgtggggatggggttgaaaaagatatgaatcgcgaagatgtgggtaaatga

SEQ ID NO: 780 - DNA, 2556 bp, Artificial Sequence
  6xHis UPI0001F76D1F
atgcatcaccaccaccatcacgaaaatttatatttccagggctccatgagtaccttcgacgtcgacgatattctgagccagctccatgtgaaggaaaaggtgcagctgctgagtctgaaagatttctggcacaccgccaatatcgatcgtttaaacatcccgagcgtccgtctcagcgatggaccgaatggcgtccgtgggaccaagttctttcgttcagtgcctagtgcatgcttttcaagtggcaccgcgcttgcggccactttcaatatgccgctgctggaacagcttgggaagctgatggccgaagaagcgcgtcacaaaggggcccacgtcattcttggccctacatgcaacattgcgcgtggtcccctcggcgggcgtggctttgagtcttttagcgaagatccttatctgagcggtattgccgccgccgccattattaaaggtattgagagtcagggtatcggcgcgacgcttaaacacttcgtgtgcaacgatctcgaagacgagcgtaattccattgatgtcatcttaagtgatcgcgcgctgcgcgaaatctacctcctgccgtttcagatcgccatcaaggaagccaaccctaaatgcgttatgagttcatacaacaaagtaatgggcgaacatgtgagccagagcaaaaaactgctgacggacattctgcgtaaagaatggggctgggatggtctgaccatgtccgactggtttggcgtctacagcattaaaagttctctggatgccggcctggatcttgaatgcccggggtatccgctgatgcgcaaacatgatgcattaattcacgcgattagctcacgtgaaattaacatggacgtgattgatatccgcgtgcgaaatatcctgaagttagtgcagcatgcgctgaagagcagcatcccccaaaatgcaccagaggatagcgagaataacaccccggaaacgtcggctttactccgtaaggccgccagcgaagcaattgtactgttgaagaatgagtcaagtattttaccgctgaaaccgtccgatgaaatcgcggtgattggtccgaacgcgcgcatccctcgcatgtatggtggggggagtgcgagcgtcaactgttactacggcatttcagtctacgatggcatttccaacaagattggcagccagcctccgtactctatggggtgcgatattgcacgcaatatgttcgacctgggcaaattggcctcgtacaaaggcgaacctggtgtgcgtatcaaagtgtataaagaagcgcccgggacgcctgatcgctctctaatcgaagaatttcgctatgactctttacaacttttattgtttgactacaaccatgagaaactggactcgtcactgttctactttgacattgaaggagaatttaccagcgacaaagatatgagctatgatatccacctgtcgtgcctgggaaccgccctcctgtatattaatggggaattgtttatcgatgacaagacgaatcagaaaatgggtttcgcggcaatcggcgcatccagcttaggtgacacgaaaacgatccacatgaaaaaagatgaacgcatcgaatttaaaatagaattcggatctgcgccgacctttacccttgaaacgttagatctggttgcaagcaatggtggcggtagcctcacggtggccattggcgagaaaattaccgatcaaaaccgtattaatgatgcggtggaactggcgaaaaccgcagataaagtcattctgtgcgttggtacttctagtgactgggaaagcgaaggcttcgaccgtccgcacatggatctgcctaaaagccagggaatcctgattgaggagattcttaaagtgaataaaaacattattctagtcaacctgtcggggacccccgtcacgctgccgtggattgacgaaattccggctgttgtgcacggttggttcaacgggatggaaagcggaaacgcgatggcggatgtgctgtatggcgacgtgaatgcgtcgggcaagcttagcttatcgtggccaaaacgttgtgaggacaaccctagctttctgaactttaaatcggataaaggtaaggtggtttatggggaagacgtgttcgttggctataggtattacgaaaaagtatgtcgcgagcccctgtttgcatttggttatggcttaagctataccgcgttcaacttcgacggcctagatgtcaaggtggcggcagataacttggtgtgtactctcaacataaagaatataggtaaactgcgcggcgcggaagtcgtacagctctatgtgatcccgccactgactaccaccaccgttagtcgcccactgaaagaattcaaaggatgccagaaagttttcctggagccgggccagaagattaccaccactattagtgtaccgattaagtacgcctgttcatattttgatgtggaacgtcaaaagtggtccattgaaagcggcgaatacggagtgtttattggcaactctagcgatgcgatggatgctctgatcggcaagtttgtgattcagaagcctctgttatggtcaggcttgtga

SEQ ID NO: 781 - DNA, 2337 bp, Artificial Sequence
  6xHis UPI0003F2059F
atgcaccaccatcaccatcatgagaatttatatttccagggcagcatgtcgttgggccttctgaccccgcaactgcaagcccagcaaccggcgacagcagcgacagcgcgcgccgctgcaccggatcccaaaatgactaaattcatcgacgaactcctgcagaaaatgaccctcgaagagaaaattgggcagcttaatatgattactgttggcttcgatgttaccgggccggtggtgtccaaagacgttgatgcaagcatcaaacgcggcagtgtgggttccgtgttaaatacgttcaccccgcaggccgcgcgcaaattacaggaaatggcggtcaagcagacacgcctgcacatccctctgattttcggttacgatgttatccacggtcaccgtacgatcttccccattgcactgggcctggccagctcatgggatctcccggcgatggagcgttcagctcgtatcgcggcggaggaagctagcgcggatggcattaattgggtttactcgcctatggtggacattgcgcgtgacccgcggtggggacgtatttcagagggtagcggcgaagatccgtatctgggttctcagattgcccgcgtgatggtacgtggttatcaaggagatgacctaaaaaaaaataataccgtcatggcgtgcgtcaaacacttcgccctgtacggcgctgccgaagcgggccgcgactataataccacagatatgtcattggtccgcatgtacaatgagtatttgccgccttataaagcggccgtggaagcaggtgcgggatcaatgatgagttcatttaacgatattaatggtgtgcccgccacaggaaacaagtggttgatgaccgagctgttgcgcaatcagtgggggttcgatggctttgtggcgacggattacacggccatcaatgaaatgaccgcgcatggaatgggtgatgatgcccaggtaagtgcactggccttgaacgccgggattgatcaagatatggtgggtgaggtttttctgaagaacctggcgcagaatctgaaagacggcaccgtacaacaggcgcagattgacctagcatgtagacggatcctggaagcgaaatggaagcttggcctgtttgaagacccataccgttacaccaacgagaagcgtgcaaaagcgacgatgatgaagaaagaatttgttgcggacgcgcgtgatattgctcgcaaatccctcgtgttactgaagaacagcaacaataccctgccgctcaaaaaacagggcacaattgcgctgattggacctctagcgacgcgtcagcgcgacatgatcggtagctggtcgggtgccggggactggaaacaagcggtgtcactggagcagggcatcaaaaatgccgttggttcaggtgtaaaagtggtcaccgctcagggtgcgaattttactgatgacgagcagatgattgctcgccttaaccagcacggtggcgaattgaacgttgatcagcgtacatctgaagagatgatccgagaagctgtgcaggtcgctcagcaggcagatgtaatcgtggcagcagttggcgagagccaaggcatgacgggtgaagcggcaagccgcgccgatattggtctgccgggccagcagctagaactgttaaaggccttaaagaaaacaggcaaaccgttagtgctggtcctgatgaatgggcgtccgctcaccctcccgtgggaggataagaatgctgatgccattcttgaaacatggttcgcagggtcgcaggccggtaatgcgattgcggatgttttattcggcggctataatccggccggcaagcttacagccacatttccgcagcacgtcggacaagtgcctttatattataaccacaagatgaccggccgcccgtaccaaggcgtggcactggataaatacaaatctcgctacatggacgtgagcaacgacccgctttacccatttgggttcggcctgagctacactacctttgaatacagcaaaccggaactgtcaactacaaccctggcgatgaacggcaccttggaagtgaaagttacggttaaaaataccgggaattacgatggcgaggaggttgttcagctgtatacccgtgacatggttggaagtattagtcgcccggtccaggaattaaaaggctttcagaagatcatgttaaaaaagggtgaaagccgcatcgtgagctttaggctgacgccggaagatcttaaattttataacactgacctcaaatttgcggcagaaccaggcgactttcaagttatggttggcggcaatagcagggatgttcaaatggctgcctttaaacttgcggcccagtga

SEQ ID NO: 782 - DNA, 2490 bp, Artificial Sequence
  6xHis UPI00006E8E1B
atgcaccaccatcaccatcacgaaaatctgtactttcaaggcagcatgaaaaaaaccatcatcaaaacagcccgtgttagcctgcttaccgcgctcgtgatctccaatctctcctggaactctgtgtcagatgatgagaacaacccgccgttcttaactgtgaaaggcttcacgttccgtgacctgaacaaaaacggcaaacttgatatctacgaagacactcgtctgagcattcatgaacgcgcggtggatctggtgaagaaaatgaccgaggaggaaaaagccaactttctgatgggcaccggtatgcctggattcgacggtatcaaaccggttgtgggcgccatagagggtcgcgtgcccggtgcggctggtggtacgtacgaaatcaaacgtttaggtataccagcgattattgttgcggatggtccggccgggctgcgtattaaaccgattcgcgaaaacgacaaaaatacctattactgcactgcgtttccggttggcaccgctcttgcttcaacatggaacgaaagcctgatcgaaaaagtgggcaaggcgatgggcaacgaagtaaaggaatatggcgtagatgttctgctcgcgccggctctgaatatccaccgcaacccactttgcggccgtaactttgaatattacagtgaggatccgctggtgtctggcaaaattgcgtcagcaatggttaaaggcatccaactgaatggtgtaggtacctccattaaacacttcgcggcgaacaaccaggagacgaaccgcctgagcatcaatgaacatatcagtgaacgcgccatgcgcgaaatctatcttaagggtttcgaaattactgtcaaagaatcaaacccgtggactgtcatgtctagctacaatctcattaacggcacctacacctcggcccgtaaagatctgctaaccgatatcctgcgcaatgaatggggctttaaagggattgttatgacggattggtttggcggctttgccggggcgcagagcattatggccggtagctcgaacgttacggaacaactgtccgcaggtaatgatctgctgatgccgggtattgaagcacaaaagaaagccatcatagaaaatattaacaacaagaaactcagcaaagaagttgtggacaaaaacgtggaacgcattttagagttggttctgcgttcccctattatggaaaactacaaatacagcaacaaaccgaatttgaaggaaaacgcccaaatcacgcgtcaggcagccagtgagggcatgattcttctgaaaaacgataagaacgtgctgccgttcaccaataagaagggcaaagctgcggtatttggtgtcacaagctatgatttcattagtggcggcaccggtagcggcgatgtcaacgaagcgtataccatctctctgttggatggcttaaagaatgccggctattcgattgacgaagaactgaagactacttacaccccgtttgtggccaaagtgaaagaagcggaaatggaatcgcgcaagaaagagggttttctggcactaccaaaacgcctcccggagttgaaactggaaaagcaggaaattgctaaacatgccgctagcagtgaattagccattataaccatcggaagaaattccggtgaaggtggcgatcgtaaagtggataatgacttcaacctggcacaggatgaagttgaattgattaataatgttagcgaggccttccattcgaaaggtaaaaaagttgtggttattttgaacattggtggggtgattgaaacagcatcgtggaaggataaagcggacgccattctgctgtcatggcagccgggtcaggaaggaggcaattctgtggcagatgtgttcagtggcaaggtcaatccatcgggcaagctgactatgacgttcccgatgaaatatgaggatactccgtcagcgaaaaactggcttggcaccccggccgacaatccggcgaatgtcacctatgaagaaggcgtctacgtcggctatcgctattataacacatttaatgtgaagccgtcctacgagttcggatttggtaattcatacacgacgttcaattattccgacgttaaactgagcagcccggtattcaataatgctatgaccgttagcgtaaccgttaaaaacactggtaaaactgccggcaaggaagtggtacaggtgtatttatcggcacccagcaaatctatcgataaaccgaaggaagaattgaaggcatttgcgaaaaccaaagagctaaaaccgggtgaaagcgagacgctccagctggtcttgtcgccgaaggatcttgcgagcttcttagaaaacaaaaatgcatggattgcggaagcgggtacctataaagtgttagtgggtgcgagttcattagacattaaaaagaccgcggagtttaccgtgtcgaacgagattgtggtcgaaaaggtcaaaaaagcctttgagcttgacacaccgttcaaggaactgaaacaatga

SEQ ID NO: 783 - DNA, 1392 bp, Artificial Sequence
  6xHis UPI000012690B
atgcaccaccaccatcatcacgagaatctgtattttcaggggagcatgagcgagaacacctttatctttccggcaacgtttatgtggggcacctcgacttcgtcatatcagatcgaaggtggcaccgatgaaggcggtcgtacccctagcatttgggataccttctgtcagattccgggtaaagttattggcggtgattgcggcgatgtggcctgtgatcatttccatcactttaaggaagatgtgcagctgatgaaacagttaggctttctgcattaccgtttttcggtggcttggccgaggattatgcctgcggcgggtattatcaacgaagaagggttgctgttctatgagcatctgcttgatgagatcgaactggcgggcctgattccgatgctaactctgtatcattgggatttaccccagtggatcgaggacgagggcggctggacccagcgcgaaaccattcagcatttcaaaacttacgcgagcgtgattatggaccggtttggcgaacgcattaactggtggaataccattaatgagccttactgcgcttccatccttggctacggcaccggcgaacatgcgcccggtcatgaaaactggcgtgaagcctttaccgcggcgcatcatattctgatgtgtcatggtatcgcaagcaacctgcacaaggaaaaaggtctgacgggcaaaatcggcattaccttaaacatggaacatgttgatgcggcctccgaacgtcctgaagatgttgcagccgcgattcgccgcgatggatttattaaccgatggtttgcggaacctctgtttaacggcaagtacccagaagatatggtcgaatggtatggcacctacttaaacgggctggatttcgttcagcctggtgatatggaattgattcagcagccgggcgatttcctgggcatcaactattacacacgtagcatcattcgcagcacgaacgatgcgagtctgctgcaggtggaacaggttcacatggaggaaccggtgaccgacatgggttgggaaattcatcccgaatcattttacaaactgttaacccgcattgagaaagatttcagcaagggcctgccgatcctgattaccgagaacggcgctgcaatgcgtgatgaactggtcaatggccagattgaagacacgggccgtcacgggtatattgaagagcatttaaaagcgtgccatcgtttcattgaggaagggggtcagctgaaaggctatttcgtttggtccttcctggacaactttgaatgggcctggggttacagcaaacgtttcggcattgtgcatattaactacgaaacccaggaacgcacaccaaagcagagtgccctgtggtttaaacaaatgatggcgaagaacggcttttga

SEQ ID NO: 784 - DNA, 1518 bp, Artificial Sequence
  6xHis UPI000009D014
atgcaccatcatcatcaccatgaaaacctgtatttccagggcagcagtttacgaggttgtattgcacagcagtcaggcggcggattaacccgtgggtcattcccggaaggctttgtttttggcaccgcgagcgctgcatatcagtatgaaggggccgtgaaggaagatggccgtggtcagaccatttgggacactttcgcccatacttttggcaaaattacagacttctcgaacgctgacgtagcggtggaccaataccaccgtttcgaagaggatattcagctgatggcagatatgggcatggacgcgtatcgttttagtatcgcgtggagccgtatttatccgaacggcgtgggccaagtgaatcaggcaggtattgatcactacaataaactgatcgacgcgctgctggccaaagggattcagccctacgtgaccctatatcattgggatctcccgcaggcgcttgaggacaaatacaaaggctggcttgatcgccagatcgttgatgacttcgcggcgtatgccgagacctgcttccgagagttcggtgatcgtgtgaaacattggattactctgaacgagccgcatactgtggccattcagggttacgatgcgggactgcaggcgccgggtcgttgttcggtattgctgcatctctattgtaaagctggtaactccggtacggaaccgtatgtggtggcacatcatttcattctggcgcatgctgcagcggcgagtatttaccgcacgaaatataaagccacgcagaacggccagctgggaattgctttcgatgtcatgtggtttgagccgatgagcaacaccactattgatatcgaagcagcgaaacgagcccaggagtttcaactggggtggtttgcggatccgttcttttttggagattatcccgcgacaatgcgcgcacgtgttggtgagcgtttaccgcgttttacagcagacgaagcggcggtggtcaaaggcgccctggattttgtgggcattaatcactataccacgtactatacccgccacaataacacgaacattatcggcaccttactgaacaacaccttagcggatacgggcactgtgtcgctgccgtttaaaaatggtaaaccgattggcgatcgcgctaactccatctggctgtacattgtgccgcgtggcatgcgtagcctgatgaactatgttaaagagcgttataatagcccgcccgtgtatattacggaaaacggtatggatgacagcaacaatccgttcatctcgatcaaagatgcgcttaaagatagcaagcgcattaaatatcataatgactacctgactaacctggccgcgtcaatcaaagaggatggttgtgatgtccgcggctacttcgcctggtccctgttagataattgggagtgggcggcgggttactcaagtcgttttggcctttattttgttgactacaaagataacctgaaacgctacccgaaaaacagcgtgcagtggtttaaagctctgctcaagacctga

SEQ ID NO: 785 - DNA, 1506 bp, Artificial Sequence
  6xHis UPI0000E580F2
atgcatcaccaccaccatcatgaaaatctgtatttccaaggtagcgcatataactctgctggcgaaccgccggtgagccgtcgatcctttccgaaaggcttcatttttggtaccgccagttcgtcatatcagtacgaaggtggggccgccgaaggcggtcgtggccctagtatctgggataccttcacacatcagcatccggaaaagattgcggatcgctcgaacggtgatgtggccagcgactcgtaccatctctataaggaagatgttcgtttgatgaaagacatgggaatggatgcgtatcgtttttctatctcttggacccgcatcctcccgaacggcagccttcgcggtggcgttaacaaagagggcatcaagtattacaataacctgattaacgaactcctcagcaaaggcgtgcagccgttcattacccttttccattgggattcgcctcaagccctggaagacaaatacaatggttttctgagcccgaatattattaatgatttcaaagactacgcggaaatctgcttcaaagaattcggtgaccgggtgaagaactggatcacatttaatgaaccgtggacattctgtagtaatggttatgccaccgggctgtttgcaccgggtcgctgtagtccgtgggaaaaaggcaactgctcggtgggcgattcgggtagagaaccgtataccgcctgtcatcaccaactgctggcacatgcagaaactgttcgcctgtacaaggcaaaatatcaggcgctgcagaaggggaaaatcggtattactctcgttagccactggtttgtgccgttctcacgtagcaagtccaacaatgatgccgccaaacgagcaatagatttcatgttcggttggttcatggatccgctgatccgcggggattacccgttatctatgcgcggcctggtgggtaaccgcttgccgcaattcaccaaagaacagagcaaactagtgaaaggcgctttcgatttcattggcttgaactactacacggccaactatgctgataacttgcctccgagcaacggcttgaataacagctatacgaccgattcacgcgcgaatctcacgggtgttcgtaacgggattccaattggtcctcaagcggcctctccgtggctttatgtctacccccaaggtttccgtgatctactgctgtatgtgaaagagaattatggcaatcccaccgtgtatatcaccgaaaacggtgttgacgaatttaacaacaagaccctaccgctgcaagaagcgttaaaagatgacgcccgcatcgaatactatcataaacatctgctcagcctgctgtcagcaatacgtgatggcgccaacgtgaagggttatttcgcatggagccttctggataattttgaatggtcaaatggctacaccgtgaggttcggaattaactttgtggattataatgatggccgtaagcgctatccgaagaactccgcacattggttcaagaaattcctgctgaaatga

SEQ ID NO: 786 - DNA, 1602 bp, Artificial Sequence
  6xHis UPI000EA7F16F
atgcaccatcatcatcatcatgaaaatctctacttccaaggcagtatggatgtgacgtgttggaaatacgcaattccgggggaaccgggcggtgaactgaccgccgaagaagtgtttgcctctaaagacacggcatttccggaaggatttttatggggcgctgcaacagccgcatatcagattgaaggggcggctgccgaagatggacgtggtccgtccatgtgggatactttctcgaaaatccccggcaagattgataacggtgataccggagatgtggcatgtgatcattatcatcgttacaaagaagatgtgaagttaatgaaggggatgggactgaaaagctaccgcttttccgtatcgtggtcgcgtgtgcttccagaagggactggcgcgattaacccgaaagggatggaattctaccagaacctgaccaacgaactcattgccaacggaattgtcccgaccgttaccctgtaccattgggacttacctgaagccctgtcaaaaaacggtggctggctgaatgaggataccgccgtagcgtttggtcagtatgcagatgtaatgtttcaggccttgggcgatcgcgtgaaactgtggttcacattgaatgaaccgtggaccaccgcaattgccggttacggccaaggtgggcatgcacctgggcttaaaaacatggccgaaaacccgtacatggcgggccataaccagttactgggtcatgcggcagcggtcaaagtttaccgtgaaaaatatcaggaaaaacaggggggtaaaattggtgcggtgttatccacagagtggaaagaaccgctgtgtcacacgcaagaagataaagatgcagccgaacgcagcctgatttggtacctggcatggtttgccgaccctatctataagggcgattacccggaggaaatgaaagaacgagtgggggatcgtatgccggcgttcacggagcaacaaaagcaggacctgaaaggttccgcagatttctttgggatcaaccactatgctaccaacctgttacaggggccgacagaaaagatcggcgctgaaaactatttcagcgatctgaacggatggatcatgatggatccgcgttgggcagttggcgatgcgtcatggttaagcgtagttccgtggggcatgcgtaggttactgcgttggatcaaacatcgctacgatgatccggtggtctacgtgaccgaaaacggtctgtcagtgcctaacgagtccgcaatgacgccggaagcggctctaaacgacaaaatgcgcgtcgattatctgcagggttatgtggcagaaatgtggaaagccatcaattacgacaaagttaaggttgcgggctactatcattggtcactgctggataatttcgaatggagcgacggttataaagtgcgctttggcttagtgcaggttgattataagacgcagaaacgaacgctgaaagagtcggcgaaagtatataaggacatgattgcgaaatacagtggagacaccgccccgcctgacgatgcggaggctgtagcacgtgatgctgtaaaagcgaccccaagcgccgaagcccccttagaacatcatcaccatcaccactga

SEQ ID NO: 787 - DNA, 1401 bp, Artificial Sequence
  6xHis UPI00006AE508
atgcatcatcaccaccaccatgaaaacttatacttccaaggcagtatggccaaaattattttcccggaagacttcatctggggagcagcaacctcaagctatcagatcgaaggtgcgttcaatgaggatggcaaaggcgaatcaatttgggatcgtttcagccacaccccaggcaagattgaaaatggtgatactggcgacattgcctgcgatcactaccacctgtaccgcgaggatattgaactgatgaaggagatcggcattcgcagctaccgttttagcacctcatggccgcgtattctgccggaaggaaagggccgcgtgaaccaaaaaggtttagatttctataaacgcctggtggataatctgctgaaagccaacattcgccctatgattaccttgtatcattgggacctgccgcaggcattacaggataaaggtggctggaccaatcgcgatacggcgaaatacttcgccgaatatgcccgactcatgttcgaggaatttaatggcctggtagatctgtgggtgacccacaacgagccgtgggtggtcgcatttgaaggccacgcgtttggcaatcatgcgccaggaaccaaggatttcaagaccgcgctgcaagtagcccaccatttgttactgtcgcatggtatggcggtagatatctttcgtgaagaggatttgccgggcgagattggcattaccctaaatctgactccggcgtatccggcgggggactctgagaaggatgtgaaagcggcgagtctcctggatgattacatcaatgcatggtttcttagcccggtgttcaaaggcagttaccccgaagaactgcatcacatctacgaacagaatttaggcgcgttcaccacacagccgggtgacatggatatcatcagccgcgatattgattttctgggcatcaattactacagccgtatggtggttcgccacaaaccgggcgataacctgtttaatgcggaagttgtaaaaatggaggatcgcccctcaaccgaaatgggctgggaaatctacccgcagggtctgtacgacattctggtacgtgtgaataaagaatataccgataagccgctgtacattaccgaaaatggcgcggccttcgatgataagctcacggaggaggggaagattcatgatgagaagcgcatcaactacctgggagaccacttcaaacaggcatacaaagcactgaaagacggtgtgccgctgcgtggctattacgtttggtcactcatggataatttcgaatgggcttacggctatagcaaacgcttcggcctcatctatgtcgattatgaaaacggcaaccgtcgttttctgaaggattctgcgctgtggtaccgtgaagtgattgagaagggtcaggttgaagccaactga

SEQ ID NO: 788 - DNA, 2619 bp, Artificial Sequence
  6xHis UPI000018B2B4
atgcatcaccaccatcaccatgaaaacctgtatttccagggctccgcgccggagccaatccatccgtcacatcagcagttaaataaacgttctctggcttattcggagccgcactatccgagcccttggatggatcccaaagcgattggctgggaggaggcgtacgaaaaagcgaaagccttcgtgagccagctgaccctgttggagaaagttaacctgacaaccggcatagggtggggtgccgaacaatgtgtgggtcaaactggggcgattccgagacttggtctgaaatctatgtgcatgcaagacgcaccgttggccattcgcggcaccgactataacagcgtctttccagcgggtgtgactacagcggcgacctttgaccgtggtttgatgtacaaacgcggctatgcgctgggccaggaagcaaaaggtaaaggcgttaccgttctgctaggtccggtagcagggccgttaggccgtgccccggaaggcgggcgtaattgggaaggatttagtaccgatcctgttttaactggtatcgctatggccgaaacgatcaaaggcacccaggatgcgggtgttgtggcatgcgcgaaacattttattgggaacgagcaagaacactttcgccaagtgggtgagtcacaagattatggctacaacatttcagagactctgagctccaacattgacgataaaaccatgcacgaaatgtatctgtggccctttgtcgatgcaatccgagcaggtgtaggcagcttcatgtgcgcgtatacccaggcaaataacagctattcgtgccagaacagcaaactcttaaacaatctgctgaagcaggagaacggctttcaaggattcgttatgtctgactggcaggcccatcactcaggcgtggcttctgcggcagctggattagacatgagtatgccgggtgatacgatgtttaactcgggtcgcagttattgggggaccaacttaaccttagcggttcttaatggtaccgttcctcaatggcgcatcgacgacatggcaatgcgtattatggccgcgttctttaaagtaggccagactgtggaagaccaggaaccgattaatttctcattctggacgttagatacatacggcccgttgcactgggccgcacgtaaggactaccagcagatcaattggcatgttaacgtacaaggagatcatggctctcttatccgtgagatcgcggcgcgagggacagttttgctaaaaaatactggcagcctgccattgaaaaagccgaaatttctcgctgtaatcggggaagatgcaggtccgaacccgttgggtcccaatggttgtgcggataaccgctgcaataacggcactctgggcattggttggggcagcggtacgggcaatttcccatatctggttaccccggatcaagctctgcaggcacgcgccgtacaggatgggagccgttatgaatccgtgctgcgcaatcatgcaccaactgaaattaaggccctggtgtcacaacaggacgccacggcgattgtatttgttaacgcaaacagcggagaaggcttcatcgaaattgacggtaacaaaggcgatcgtttaaacctgacgctgtggaatgagggtgacgcgctggtaaaaaacgtttcgagctggtgtaataatacgatcgtcgttttacataccccgggacccgtgttactgaccgaatggtacgacaatcccaatattaccgcgattttatgggccggtatgcctggtcaggaatctggcaattccatcaccgatgtcctatatggccgtgtgaatccgagcggacgcacccccttcacatggggcgctacccgagaatcttacggaacggatgttctgtacgagccgaataacgggaatgaagctccacagcttgactacaccgaaggagtgtttatcgattatcgccattttgataaggcgaacgcgtcggttctgtatgagttcggcttcggcctgagctacaccacattcgaatacagcaatctgaaaatcgagaagcatcaggttggtgaatacactccgaccaccggtcaaacggaagcagcacctacctttggtaattttagcgaatccgttgaggactacgtgtttccggcagcggagtttccgtatgtttatcaattcatttatccatatctgaacagcacagacatgagcgcgagtagtggcgatgcacagtacgggcagacagctgaggaatttttgccccctaaagcgaacgatggtagcgcacagccactgctccgtagcagtggtctgcaccacccgggcggtaatcctgcgctttatgatataatgtatacagtaactgcggatattaccaacaccggtaaggttgcaggcgacgaggtgccgcagctgtacgtgtcattgggtggtcccgaggatccgaaggtagtgttacgtggttttgatcgcttgcgtgtggaacctggggaaaaggtgcagtttaaggcggtcctgacgcgtcgtgatgttagttcctgggatacggtgaaacaggattgggttattacggaatatgcaaaaaaggtctatgtcggcccgagttctcgaaaattggatcttgaagaagttctgccgtga

SEQ ID NO: 789 - DNA, 1464 bp, Artificial Sequence
  6xHis UPI000192BB5F
atgcatcatcaccatcaccatgagaatctctactttcaggggtcgatgatgaatcatctgagtcagaaattcgcgtggccgaaagaatttctgtggggcagcgcgaccgcggccgcacagatcgagggcgcaggtcactcctacggcaaagaagattcggtttgggatgcctttgcccgtaaagaaggtgccattgccggcggtgaaaacttagaagtcgcagttgatcattaccaccgctatcgtgaagacgtgcaactgatgcgtgaactcggtctggatagctaccgtttttcaacaagctgggcccgtgtcgttccaggcggccgtactgtcaaccccgaaggcctggacttctattctcgtctagtagacgaactgttggaaaacggcattctgccgtggctgacgttataccattgggatttgccgcaggccctggaagaacgcggcggctggactaaccgcgaaaccagctacaaatttctggagtatgcggaaacggttcacgaaaaattaggtgaccgtgtgaaacactggacaaccttcaacgaacccctgtgcagtagtttaattggctacgctgccggtgaacatgcgccgggtcgacaagaacctcaggcagcattagcagcagttcaccaccagcacttagcgcacggattagcaaccgcgcgtctgcgcgaactgggcgccgagcatattggtattacgctgaacttgacgaacgccgtaccgaacaaccctggtgacccggtggatttagaagctgcacgtcgtgttgacgcattgtggaaccgtatgtatctggacccagtcctgcgtggtagttatccggaagatctacttgaagatgtgcagggattgggactggccgaagttattgaagcgggtgatctggagattatcagccaaccgattgatttcctgggggtgaatcattatcatgatgataatgtgagcggccatccgcttccagccggtcagccgcagcctgtcgtgcctaccgatagtcccaaaagctcgccgtttgtgggttccgaatacgtaacgttcccggcccgcgatctgccgcggacagctatgggctgggaagtgaatccagaaggtctgcgtgtattactgaatcgtctgaatcaggattatgccaatctgccgagcctgtatattaccgagaatggtgcaagctacacagataccgttacagaagcaggaacggtagaagatccggagcgcgaagaatatatcctaaatcatctcgatgccgttgtacgtgcgattgccgatggcgtagatgttcggggctattttgtctggagcttgcttgacaattttgagtgggcatgggggtacgccaaacgtttcggcattatccacgttgactaccagacacaggttcgcactattaaaaacagcggcaaagcgtacgccggacttattgcggcgaatcgtactatggcatga

SEQ ID NO: 790 - DNA, 1392 bp, Artificial Sequence
  6xHis UPI000285E79E
atgcatcaccaccaccaccatgagaacctgtattttcagggcagcatgaagtttgccccgaactttgttttcggcacggcgactagctcttaccagatcgaaggagcacacgatgaaggcgggcgcaccccttcaatttgggataccttctgcgataccgatgggaaagtcttcgagaaacataacggtgacgtagcctgtgatcattaccatcgcttcgaggaagacattcagcacattaagcaactgggagtggatacctatcgtttctctattgcatggccgcgcatcttcccgtcgaaaggacagttcaacccggagggaatggccttttacaaaaccctggcaacacgtctgcaggaggaaggcatcaagccggcagtaaccctgtatcattgggatctgccaatgtgggcgcatgaagaaggtggctgggtaaatcgcgatagtgttgattggtttctggactttgcccgggtgtgctttgaagaactggatggcatcgtggattcatggatcacccataacgaaccgtggtgcgcaggttttctgagttatcacttaggccaacacgccccgggtcataccgacatgaatgaggcagtacgtgcggtgcaccacatgttgttaagtcacggtaaagcggttgagatgcttaaaggagaattcaacagcgccacccctatcggtattaccttgaacctggcgcctaaatacgccaaaaccgattccattaacgatcaaattgctatgaacaatgcggatggctacgcgaaccgctggttcttggacccgatcttcaagggtcagtatccggtggatatgatgaaccttttctcaaaatacgtgcacacctatgattttattcatgccggcgacctggcgacgatcagcaccccgtgtgatttctttggcattaatttttactctcgcaacctggtcgagttcagtgcagccagcgatttcctgcataaggatgcctatagtgactatgacaagaccgggatggggtgggatatcgcaccgagtgagtttaaggacctgattcgacgcctgcgtgcggaatacaccgatttgcccatttacattaccgaaaatggcgccgctttcgatgatcagctggtggatggtaaaatccatgaccagaatcggatcgattacgtggcccagcaccttcaggctgtttcggatctgaatgatgagggcatgaacattgccggttattatctgtggagcctgttggacaacttcgagtggagctttggatacgataaacgcttcggaatcatctacgttgactttgatacccaggaacgcatctggaaagattctgcacactggtatgcgaacgtgattcagacccacaaagccgccttacctcaggaagcatga

SEQ ID NO: 791 - DNA, 1341 bp, Artificial Sequence
  6xHis UPI00000BEB61
atgcatcaccaccaccaccatgaaaacctgtatttccagggctccatgaccgaaaacgcagaaaagttcctgtggggagtggcgactagtgcgtaccagatcgaaggtgccacccaagaggatggccgtggtccgtccatttgggatgccttcgcccaacgtccgggtgctatccgcgatggctcaaccggcgaaccagcgtgcgatcactatcgccgatacgaagaagatattgccctgatgcagagtttgggtgttcgcgcttatcgcttctcggtcgcttggccgcgtatcctgcctgaaggccgcggtcgtatcaacccgaaaggcttagcattctacgaccgtttagttgatcgtctgctggcgagtggtattactcctttcctgaccctgtatcattgggatttaccgttagctttggaagaacgcggcggctggcgttcacgagaaaccgcgtttgcatttgcagaatatgccgaggcggtggcgcgcgcactggctgatcgtgtaccgttctttgcgaccttaaacgaaccgtggtgcagtgcgtttctcggccattggactggtgaacatgcaccaggcctgcgcaacttagaagcggcgctgagagcggctcaccatctgctcctgggacatggcctggcagtagaggcgttacgtgccgcgggtgcacgtcgcgtgggaattgttttgaacttcgcgccggcgtatggtgaagacccggaggccgtcgatgtagccgaccgttatcataaccgattctttctggaccccatcctgggcaagggttaccctgagagtccgtttcgtgatccgcctcctgtgcctatcctctcacgtgatctggaactggttgcgagaccgctggattttctgggcgtcaattactatgcgccagttcgcgttgcccccggcacaggtactctacccgttcgctatttaccgccagaaggcccggcaactgctatgggatgggaagtgtatccggaaggtttacatcatctcctgaaacgccttggccgtgaagttccctggcctctgtacgtgacagaaaatggcgctgcttatcctgatctttggacaggcgaagcagtggtagaagatccggagcgcgtcgcatatttggaagctcatgtcgaagccgccctgcgcgcccgcgaagagggtgtggatttacgtggatactttgtttggtcactgatggataatttcgaatgggcgttcggttacacacgccgattcggtttatattacgtagatttcccgtcacagcgtcgtattccgaaacggtcagccctgtggtatcgcgaacgcatagctcgtgcgcagacatga

SEQ ID NO: 792 - DNA, 1443 bp, Artificial Sequence
  6xHis UPI00078BF747
atgcatcatcatcaccaccatgaaaacctgtacttccagggctctatgctgcctaaagacttccaatggggctttgcgacggcggcttatcagattgaaggcgcgatcgataaagatggccgtggaccatcaatttgggacactttctgcgcaattcctggaaaaatcgcagacggaacctctggtgtaacggcgtgcgatagttataatcgcaccgcggaagatattgccctgttgaaaagtctgggcgctaaatcttaccgcttcagcatttcttggagccgcattattccgaagggaggtcgcgacgatccggtgaatcaactgggtatcgatcattatgcgcagttcgttgatgatctgctggaggcgggcattacaccgtttattaccctgttccattgggatcttcctgaggagctgcatcagcgctatggtggcctgctgaaccgtaccgagttcccgttagatttcgaaaactatgcccgtgtcatgttcaaagcactgccgaaggttcgcaactggattacgtttaatgagccgttatgctcggcgattccgggctacggcagcggtacctttgcgccgggtcgccagagcactacagaaccgtggattgttggccataacctgcttgtagcgcatggtcgcgctgtcaaagtataccgtgacgagtttaaagatctgaacgacggtcagattggtattgttctgaatggggattttacctacccgtgggatagtagcgacccgctggatcgtgaggctgcggagcgccgcttagagttttttaccgcgtggtacgcggatccgatttatttaggcgactacccggcaagcatgcgtaaacagctgggggaccgtctgccggaatttaccccggaagaaaaggcgtttgtgctgggcagcaatgatttttatggtatgaaccactatacctctaactacatccgccatcgtacgtctccggcgacggccgatgatactgtgggtaacgttgatgttctgttctataacaaagaaggtcagtgcattggcccagaaaccgaaagcagctggctgagaccttgcccggcgggtttccgtgattttctggtctggattagcaagcgctataattacccgaaaatttatgtgacagaaaatggcacgagcctcaagggtgaaaacgacctgccgaaagaaaagatcctggaagacgacttccgcgttaattattacaatgaatacattcgcgcaatgttcacagcagccacgttggatggtgtgaacgtgaaaggttactttgcatggagcctgatggataacttcgaatgggccgatggatatgttactcgctttggcgttacttatgtggattatgagaacggccagcagcgctttccgaaaaagtcagcgaaaagcttgaaaccactgtttgacgaactgatcgcgaaagagtga

SEQ ID NO: 793 - DNA, 2280 bp, Artificial Sequence
  6xHis UPI000006AA61
atgcaccaccatcaccatcacgaaaatttgtactttcagggatccatgcgctatcgtacggcagcggcgctggcgttggccactggtccgtttgcacgcgcagatagtcattccacctctggcgcgtctgcggaagccgtggtgccaccggcgggcacaccttggggcaccgcctatgacaaggccaaagcagccctggccaaattgaacttacaagacaaagttggtattgtttcgggtgtgggttggaatgggggtccttgcgtgggtaacaccagcccggcctcgaaaatctcgtatccgagcctatgccttcaggacggccctctgggggtacgttattcaacaggctcgacggcgtttaccccgggcgtccaggcggcgtcaacctgggatgtaaacctgattcgcgagcgtggccagttcatcggcgaagaagtgaaagcatcgggtattcacgtaatcttaggcccggtcgcgggcccccttggaaaaaccccgcagggaggtcgtaattgggaaggctttggcgttgatccgtacctgacaggcattgctatgggtcagacaatcaacggtattcaaagcgtgggggttcaggccaccgcaaaacattatattctgaacgagcaggaactcaaccgtgaaaccatatccagtaacccggacgaccgcaccttacacgagttatacacttggccctttgccgacgcagttcaagcgaacgtcgcgtcggtcatgtgttcctataataaagttaacaccacctgggcctgtgaagaccaatatacactgcagacagttctgaaagatcagcttggctttcccggctatgttatgacggattggaacgcgcagcatactaccgttcagagtgcgaacagcggcttagatatgagcatgccaggtaccgatttcaatggtaacaatcggctatggggtccggcactgacgaatgcggtaaattctaaccaggtgccgacctcacgtgttgatgatatggtgacgcgtattttagccgcatggtatttaactgggcaggatcaggccggctacccgtcctttaacatttctcgtaatgtgcagggtaatcataaaaccaacgtaagggcgatcgcgcgtgacggtattgtgctcttaaaaaacgacgcgaacatactgccgcttaagaaaccggcgtctatcgcggtcgttggctccgcagccatcattgggaatcacgcccggaatagtccgagctgtaacgacaaaggctgcgacgatggcgcgttgggcatgggatggggatcgggggcagtgaattatccgtattttgtcgcaccgtatgatgccattaacacccgtgcaagcagtcagggcacccaagttacattatcgaacacagataatacgagtagcggtgcgagcgcagccaggggcaaggatgtggcgattgtattcattactgccgatagtggcgagggttatatcacagtggaaggcaacgcaggtgaccgtaataatctggacccgtggcacaatggaaatgcgcttgtccaggcagttgcgggagccaattcaaacgtaattgtggtggtacactcagtgggcgcaattattctggagcagattctcgccttaccgcaagtaaaagcggtggtttgggccggtctgccttcgcaggagagtggcaacgccctggttgatgttttgtggggcgatgttagcccgagtggtaaactggtatatacgatcgcgaaatcgccgaatgattacaacacgcggatcgtgtcaggtggctctgattcgttcagtgaaggcctgttcatcgattataaacatttcgatgatgctaatattacgccgcgttatgaattcgggtacggcctgtcctacacgaaatttaactactcccgcctgtcggtcctcagcaccgccaaatcaggaccagcgaccggcgcggttgtccctggtggtccgtcggatttatttcaaaacgtagcgactgttacggtggacattgcgaatagtggtcaagtaacaggggcggaagttgcacagctgtacatcacctatccatcctctgctccccgcaccccaccaaaacagttacgcggctttgccaaactgaacctaaccccgggacaaagcggtacagcgacgtttaacattcgtcgccgcgatctgtcctattgggataccgcgtcacagaaatgggtggtacctagcggctctttcggcatcagtgttggcgccagtagtcgcgatattcgtcttaccagcaccctgagtgttgcttga

SEQ ID NO: 794 - DNA, 1485 bp, Artificial Sequence
  6xHis UPI00000B411B
atgcatcatcaccaccaccacgaaaacttatacttccagggtagtatggttcctgccgcgcaacagacggcaactgctcctgatgcagcgctgacgtttcctgaaggctttctttggggctctgcaacggcatcatatcaaattgaaggcgcagcagccgaagacggccgcaccccgagtatctgggatacctatgcgcgtaccccaggtcgtgtgcgtaatggcgatacaggcgatgtagcgaccgatcattatcaccgttggcgtgaagatgttgctttgatggcggagctcggtcttggcgcctatcgcttctctctggcatggccgcgtatccaaccgaccggccgaggcccggcgttacagaaaggtctggatttctaccgtcgtctggctgacgaactgttggccaagggtattcaaccagtagccaccttgtaccattgggaccttcctcaggaattggaaaaccctggtggttggccggagcgtcctacagcggaacgttttgcggagtatgccgcaattgccgcagatgcgcttggcgatcgggtgaaaacctggaccacccttaacgagccttggtgctcggccttcttaggttatggcagtggtgttcatgccccgggaagaaccgatccggtggcggctttacgggcagcgcaccatctgaatctaggtcacggcttagcagttcaagccttacgtgatcgcctgcctgccgatgctcaatgttcggttaccctgaacatccaccacgtgcgtcctcttaccgatagcgaggcggatgcggacgcagtgcgccgtattgacgctttagccaatcgtgtgtttaccggtccaatgttgcagggtgcatatcctgaagatctggtgaaagataccgccggcctgaccgattggagctttgtgcgcgacggcgatttgcgactggcgcatcagaaattagattttctgggagttaactattatagcccgacattagtgagcgaagcagacggaagcggcacccataacagcgatggtcacggtcgttcagcacacagcccgtggccaggagcggatcgcgtcgcattccaccagccgcctggcgaaacaactgcaatgggatgggccgttgacccgagcggcctttatgagcttctccgtcgcttgagctcggattttcctgcactaccactggtaattactgaaaatggggcggcgttccatgactacgcggatccagagggtaatgttaacgatccggaaagaattgcgtacgtccgcgatcacttagcggcagtacaccgtgctatcaaggatggcagcgatgttcgcggatactttctatggtcacttctggacaattttgaatgggcgcatggctattcgaaacgcttcggtgcggtttatgtggattaccctactgggacccgtataccaaaagcgagcgcgaggtggtatgcggaagttgcacgcaccggggtgctcccaacagcttga

SEQ ID NO: 795 - DNA, 1488 bp, Artificial Sequence
  6xHis UPI00000C7E56
atgcaccatcaccatcatcatgaaaatctgtattttcagggctctatgctggcctttcctaaagaattctggtggggtggtgcgacatcaggtcctcaatcggaagggcgttttgccaaacaacatcgtaacctcttcgactactggtacgaagaggaaccggatctcttttacgattatgttggcccggatacagccagcgacgcctatcaccagattgagtcagatcttaccttactcgcgagcctgggccataactcttatcgcacctcgatccagtggacccgacttattgatgatttcgaacaagcgacgattaacccggatggtctggcgtattataaccgtgtgatagatgcgtgtctggccaacggaattcgcccggtgattaacttacatcattttgatctcccgattgccctgtaccaggcctatggaggatgggaatcgaaacatgtggtggatttattcgtggcgttcagtaaagtttgcttcgaacagtttggggatcgcgtgaaagattggtttgtccataatgagccgatggtagttgttgaaggcagctatctcatgcaatttcactacccggcgattgtggatggaaaaaaggccgttcaagtggcctacaacctggccctggcaactgcgaaagtgattcaagcctaccgacgcggtccggctgaattgagcgacggtcgtataggcactattctgaatttgacccccgcatatcctgcgagtcaatcagaagcggatatggcggcagcacattttgccgaactgtggaacaacgatctgttcatggaagccgcggtacatggcaaattccctgaggagcttgtggcggtattaaaaaaagacggcgtgctttggcagagtactccggaagaactggcgctgattgcggaaaaccgcgtagattacctcggcttgaacttttaccatcccaaacgcgtcaaagccccggatgctatccctgttatttccccgtcatggagcccggaatggtattacgatccgtatctgatgccgggtcgccgaatgaatgtggataagggctgggaaatctatcctgaggcagtctatgacatcgcaattaagatgcgcgatcactacgacaacattccgtggtttctgagcgaaaatggtgtgggcattagcggcgaagatcgataccgcgacgaaaccggccagattcaggacgactacaggattcaatttcttaaagagcatctgacctacctgcacaagggcattgaagccggctctaattgttttggctatcacgtttggaccccgattgacggttggagctggcttaacgcgtataaaaatcgctacggccttgtcgaaaataatattcatacgcaagtgcgccggccaaaagcctcagcctattggttcaaaaaagtagccacacataaccgcttgattagtctggaagtgatggaagagttcggtggctcggcatcacacttaagcgactga

SEQ ID NO: 796 - DNA, 1290 bp, Artificial Sequence
  6xHis UPI000012691B
atgcatcaccatcaccaccatgagaacttgtactttcagggctcatttaagcctctgccgatttcgttcgatgatttctccgatctgaatcgttcctgcttcgcaccgggctttgtgtttggtactgcgagctcagcgtttcaatacgaaggtgccgcatttgaagatggtaaaggcccgagcatttgggatacctttacccacaagtatccggaaaaaatcaaggaccgcaccaacggggacgttgcgatcgatgagtaccatcgctataaagaagatattggcattatgaaggatatgaacctggatgcgtaccgtttttcaatctcttggccgcgcgtgttgccaaagggcaaactgagcggtggtgtgaatcgcgagggtatcaactactacaacaacctgatcaatgaggtgctggccaacggtatgcagccctatgtgactctgtttcactgggatgtgccacaagctctagaggacgaatatcgcggcttcttaggtcgtaatatcgtggacgattttcgtgattatgctgaactgtgcttcaaagaattcggtgatcgcgttaaacactggattacccttaatgaaccgtggggcgttagcatgaatgcctatgcgtatggcacttttgcccccggtcgttgtagcgactggctgaaactaaattgcaccggaggtgattcgggacgcgaaccgtatttagccgcacactaccagttgctcgcacacgcagcggcggcccgtttatacaagacgaaatatcaggccagccagaacggtatcatcggcattaccttagtgtcgcattggtttgaaccagcgagcaaagaaaaggcggatgtggacgctgcgaaacgaggcctggattttatgttgggctggtttatgcacccgctgaccaaaggtcgttacccggaatcgatgcgctacctggtccgtaaacgccttccgaaattcagcacagaagaaagtaaggaattgacgggtagctttgacttcctgggcctgaattactacagctcatattatgcggcgaaggcccctcgcattcctaatgcgcgtcctgctatccagaccgattctctcattaatgctacgttcgagcacaatggcaaaccgcttggtccgatggccgcaagcagctggctgtgtatttatccgcaaggtatacgcaaattgctcctttacgtgaagaaccattataataacccggtcatttacattaccgagaacgggcgcaactcatcaacgattaacacggttactagccgtattccgttttga

SEQ ID NO: 797 - DNA, 2562 bp, Artificial Sequence
  6xHis UPI000006C8FF
atgcatcatcaccatcaccacgaaaatctgtattttcagggctccgagaatttagcttattctcccccattctacccttcaccttgggcgaatggtcaaggcgattgggccgaggcttatcaaaaagcggttcagttcgtatcgcagctgacactggccgaaaaggtaaatctgacgaccggtacaggctgggaacaggatcgttgcgttgggcaggttggtagcataccgcgtttaggctttcccggcctgtgtatgcaagacagtcctctgggtgtacgcgacacggattacaacagtgcgtttccggcgggagttaacgtcgcggccacgtgggatcgaaatctggcgtaccgtcgcggtgtagctatgggcgaggaacaccgaggcaaaggcgtagatgtgcagttaggacctgttgccggcccgcttggacgctcgccagatgcgggcaggaattgggaaggcttcgccccagatcctgtactgaccggaaatatgatggcgtccactattcagggcatacaggatgctggagtaattgcgtgcgcgaaacactttattttgtatgagcaggaacactttcgccaaggggcccaggatggctacgatatcagcgatagcatcagtgccaatgccgatgataaaacgatgcatgagttatatctatggcccttcgcggatgcggtacgtgcaggtgtggggtcggttatgtgctcctacaaccaggtgaataattcctacgcgtgctcgaattcgtataccatgaacaaactgctcaaatccgaactgggtttccagggcttcgtgatgactgattgggggggccatcacagtggcgtagggtcggcgttagcgggtctggatatgtcgatgcctggcgacattgcattcgattctggtacctctttttggggcactaacctgaccgtggccgtgttaaacggatcaatcccggaatggcgcgtcgatgatatggcggttcgtataatgagcgcatactacaaagtgggccgtgaccgctattcggtgccgattaactttgatagctggaccttagatacctacggcccggagcattacgctgttggacagggtcagacgaaaattaatgagcatgtggacgtacggggtaaccatgctgaaattatccatgaaattggtgccgcctcagcggtgctgcttaaaaacaaaggaggtttgcctttaactggtaccgaacgattcgtgggcgtgtttggtaaagacgccggtagcaacccttggggtgtgaacggatgctcagatcgtggctgtgataatggtacccttgcgatgggctggggctctggaaccgcgaacttcccatatcttgtaacgccggagcaggcgatccaacgtgaagtactgtctcgcaacggcacgttcaccggtattactgacaacggcgcgcttgcagaaatggcggccgcggcaagccaagcagatacctgccttgtgtttgcaaatgcagactcgggcgagggctatattaccgttgacggcaacgagggcgatcgtaaaaacttaacgctgtggcagggtgcagaccaagtgattcacaacgtgtcagcgaactgcaataataccgtggtcgtgctgcatactgtgggcccggtgctaatcgatgattggtatgaccatccgaacgttaccgccattctctgggccggtcttccgggtcaggaatcaggtaacagcctagtggatgttctgtacggtcgcgtcaatccgggtaagaccccgtttacctggggccgtgcacgtgatgattatggagcacccctgatcgtcaaaccgaacaacggaaaaggcgcaccgcagcaggatttcaccgaagggatttttattgattatcgccgcttcgacaaatacaatattacgccgatttacgagtttggctttggcctgtcctataccacctttgaattctcccaactgaacgttcaaccaatcaacgcaccgccgtacacgcctgcaagcggatttactaaagctgcccagtcgtttggacagccgtcgaacgcatcagataacctgtacccgtcagacattgaacgagtccccctttacatttatccgtggttaaactccaccgatctaaaagcctctgcgaatgatccggactatggtctgccgaccgaaaaatatgtcccgcctaatgccactaatggcgatccacagccgattgatcccgcaggcggcgcccctggtgggaatccgtcgctgtacgagccggtggcccgtgtcaccaccattattaccaacaccggcaaagtcaccggggacgaagttccgcaattatacgtcagtctgggcggtccggatgatgcccccaaagtattacgtggctttgaccgtattactttggcccctggccagcagtatctgtggactaccacactgacgcgccgggatattagcaattgggatccagttacccaaaattgggtggttaccaattacacgaaaacgatttatgtgggcaatagtagccgtaatctgccgcttcaggccccgctgaaaccgtatccgggaatttga

SEQ ID NO: 798 - DNA, 1392 bp, Artificial Sequence
  6xHis UPI0000126903
atgcatcaccaccaccatcatgaaaacctgtacttccagggcagcatgtccaagattacctttccgaaagattttatttggggcagcgcaaccgccgcataccagattgaaggcgcgtataacgaggacggcaaaggtgagagcatttgggatcgtttctcacacactcccggcaacattgctgacggacataccggtgatgtcgcctgcgatcattatcaccgttatgaagaggacatcaagattatgaaagaaatcggtattaaaagctaccgtttcagcatctcctggccgcgcatctttcctgaaggcaccggcaaattaaatcagaaaggtctggatttctacaaacgcctgaccaacctgctgctggaaaatggtatcatgcctgccatcaccctgtatcactgggatctgccgcagaaattacaggataaaggggggtggaaaaaccgcgatactaccgattatttcaccgagtacagcgaagtgatcttcaaaaatctgggtgacatcgttccgatttggtttacccacaatgaaccgggcgttgtcagtcttctgggtcactttctgggcattcatgccccgggcatcaaggacctgcgtaccagcttagaagtgagtcacaacctcttactgagtcacggtaaagcggtgaaactgttccgtgaaatgaatatcgacgcgcagattggtattgcacttaacctgtcttaccactacccggcgtcagaaaaagcggaagacatcgaggcagccgagctgtcatttagcctagcaggtcgttggtatctggatcctgtgctgaaaggccgctatccggaaaacgcgctgaaattatacaaaaaaaaaggtattgaactgagcttcccggaagatgatctgaaactaatcagccagccgatcgacttcattgcattcaacaactattcgagcgaattcattaagtacgatccgagcagcgagtccggtttcagcccggccaacagcattcttgaaaaatttgagaaaaccgacatgggctggattatttacccggagggcctgtacgaccttctgatgcttttggatcgtgactatggcaaacctaatattgtgatcagcgaaaacggtgccgcgtttaaagatgagattgggagcaatggcaaaatcgaggacaccaaacgcatccagtacttaaaggattatctgacgcaggcccatcgcgctattcaggatggcgtcaacttgaaagcttattacttatggagcctcctggataacttcgagtgggcctacggctataataaacgctttggtatcgtgcatgtaaatttcgataccctggagcggaaaatcaaagatagtggttattggtacaaggaggtgatcaaaaacaacggcttctga

SEQ ID NO: 799 - DNA, 1431 bp, Artificial Sequence
  6xHis UPI000219FE3E
atgcatcatcatcaccaccatgagaatctgtactttcagggcagcatggtggaatttccggaaggttttgtgtggggcgctgcaacaagcggcccccagacggaaggtaatttccataaacagcatcagaatgtgttcgattattggttcgcgaccgaaccggaacagtttgacgcaggcgttgggccggatactgcaagcaacttttacaacgattacgatcatgacctagcgctgatggcacaggccggcgtgcaaggtctgcgcacctctattcagtggactcgcctgatcgatgattttgaaacagcgagcctgaatgccgatggcgtagcgttctacaaccacgtaattgacagcatgctcgcccaccacattactccgtatatcaatctgcaccattttgatctgccggtggcactctatgacaaatatcatggctgggaaagtaaacacgtcgtggagctgtttgtgaaatttgcggagcagtgttttaaactctttggcgaccgcgtggatcattggtatacgttcaatgagccgaaagtcgtggtggacggtcagtatttgtacggttggcattacccgcaggtgattaacggcccgaaagccgtacaggtggcgtataacatgaacctggcgtcagcgaaaacggtagcacgttttcatgaactgtgcgtccgccctgaacagcagattgggattatcctgaatttaactccggcttatgcagcttcggatgatccggcggatttagcagccgcggagttcgctgaattatggtcaaataacctctttctggacccggcagttctgggccacttcccggaaaaactggttgaacgattaacaatggacggtgtactgtgggatgcaacgccgactgaactggcaattatagcagccaacccggttgattgcctgggcgtgaactattaccacccgtttcgtgtgcagcgtccagatattagccccaaatcactgcaaccttggatgccggacatctacttcaaagaatatgatatgccgggccgcatgatgaacgtggatcgtgggtgggagatttatccgcaggctatgaccgatattgcgcgtaatattcaaaaaaactatggcaacatcccgtggatgatctcggaaaatggcatgggagtagcaggcgaagagcgctttttggataagcagggggttgtgcaggatgactatcgtattgattttatgaaggagcatctgactgcgttagcgaaaggcattgcggcaggcagcaactgtcagggatacttcgtttggtcgggcatcgattgttggtcttggaatcacgcgtatcacaatcgctacggcctgattcgcaatgatattcacacccaaaccaaaactctgaagaagtcggccaaatggtttgctgaattgggcgaacgtaatggcttttga

SEQ ID NO: 800 - DNA, 1449 bp, Artificial Sequence
  6xHis UPI0003F2033A
atgcatcaccatcatcatcatgagaacttatacttccagggctctatggacgacgagcgtgcatatccgatgaccgatcataaagcgttggcggctcgctttccgggtgattttctatttggcgtggcgaccgccagctttcagatcgagggggcgaccaaagttgacggacgtaaaccgtcaatctgggatgccttttgtaatatgccgggccatgtctttggccgccacaacggtgatgtggcatgcgaccactataaccgctgggaagatgatttagatctcatcaaagagatgggagtggaagcgtaccgtttcagcatcgcgtggccgcgcatcattccagatggtttcggtccgatcaacgaaaaaggactggacttttacgaccgcttggttgatggctgcaaagctcgtggtatcaaaacctatgccaccctataccactgggacctgccactaaccttaatgggtgacggcgggtgggcctcgcgttcgacggcacatgcgttccagcgctatgcaaaaaccgtaatggctcgtctgggagatcgcctggatgcggtcgcaactttcaatgaaccgtggtgcgccgtttggctgtcacacctgtatggcattcacgccccgggtgaacgcaatatggaagcagcactcgccgccatgcatcatattaacttagctcatggcttcggcgtggaagcctcacggcacgtggcaccaaaagttcctgttggcctggtcctgaacgcacatagtgtgattccggcgagcaacagcgacgcggatatgaaagcagcagaaagagcatttcagttccataatggtgcatttttcgatccggtgttcaaaggcgaatatccggcggaaatgatcgaagcactgggttcacgcatgccggtggttgaagcggaagacctgagtattattagccagaaactcgattggtggggtttaaactactatactccaatgcgcgttgcggatgatgctacagaaggcgcagaatttccagcaaccaaacaggcccctgcggtttcggatgttaaaaccgatattggctgggaggtatatgcgcctgcgctgcattccctggtagaaacactgtacgaacgctacgaactgccggattgctacattacagagaacggggcctgctataacatgggtgtcgaaaacggagaagtagatgatcagcctcgcttggactactacgcggagcatttaggcattgtagccgatctagtcaaagatgggtatcctatgcgtggctattttgcgtggtcactgatggataacttcgaatgggccgaaggctatcgtatgcgttttggtctagttcacgttgattatgagacgcaggtgcgtaccctgaaaaactcgggaaaatggtacagcgcactggcatcgggttttcctaaaggcaatcacggcgtaatgaagggctga

SEQ ID NO: 801 - protein, 746 aa, Bifidobacterium actinocoloniiforme
MSEPTHVNSSDLSLEEEASLTSGSDSWHVQGLPDRGLEGYMITDGPYGLRKAKDSSSTDVYGSVPATCFPPTAGLASSWNPELTYKVGQAMGEECVQEKVAVILGPGVNIKRSPLGGRDFEYWSEDPVLTGHQAAELVEGVQSQGIGTSVKHFAANNQETERLRASSDMDERTLREIYLPAFEYIVKKAKPWTLMCAYNRLNGVFGSEDGRLMTDILRGEWGFDGIVMSDWGAVHNRAAALNAGLNLEMPPSDSDDQVVAAVKAGELSKEQLDKMAQGMIDLIEKAKPAMSRDGYRYDVQAHNQVARQAACESVVMLKNEDGILPLRSNEKIAVIGEFARTPRYQGGGSSHISPTMVTTALEAFENSSMEVSFAPGFTLDEEPQDEALTNEALQAASKADKVVLFLGLPEEAESEGFDRTSLDMPAKQVGLLGKVSAVNPNVVVVLSNGSVVSLTDWLPQAKGVLEAWLLGQAGGQAVVDLLTGRANPSGKLAQTIPLRLNDDPTVLNFPGEEGHVNYGEGVFVGYRYYDTLDKPVLFPFGFGLSYSDFEVSGVQVEKTGANAARVHATVTNTSQVDGAETLQVYVAPGKAKVNRPAHELKAFSKVFLKAGESKAVSMDLDERDFAYWSRIMKDWHIEAGDYGIELATSSRDIVQTVTIHIDGDGKTFRLNEESSMQEWEEDPIGSPILSAKLKELEADGVHLPDDPNTMVLFRTMPMGTVVTFSGANGRQVIKDLMASYKAALAK

SEQ ID NO: 802 - protein, 780 aa, Bifidobacterium psychraerophilum
MRGVWARRPQRKASQVNGNDVVHHPDPHGNEGFMGEHHHHAADLTLEEQASLTSGGDSWHLQAVESKGIPGYMITDGPHGLRKTAGSSETVDLDNTVPATCFPPAAGLSSSWNPKLVHEVGEAMAEECIQEKVAVILGPGVNIKRNPLGGRCFEYWSEDPYLAGHEAVGIVTGVQSKGIGTSLKHFAVNNQESDRLRISANVSSRALREIYFPAFEYIVTTAQPWTIMCSYNRINGVFSSENHWLLSDVLRSQWGFKGIVMSDWGADHDRVASLNAGLNLEMPPSHTDDQIVDAVRQQKVDPKQLEDMAQGMLDLTDKASAAMDIEGYRFDVQAHDDMARRAARESIVLLKNDDGILPLSTDTKLAVIGEFARTPRYQGSGSSHITPTRMTSFLDALSDAGIEAAFAPGFTLDDSEQDAALRDEALRTAQDAQTVVVFLGLPSEAESEGFDRTTLDIPRKQTELLTALAAVNKEIIVVLSNGSVVSVEPWREQAKGIVESWLLGQAGGAALVDVLFGSSSPSGKLAQSIPLDLSDDPSTVNWPGEEGHVDYGEGVFVGYRYYDTYDKPLAYPFGFGLSYADFDITDIRVDKTGANTAEVHATVSNTSSTPGAETVQIYVAPGKADVARPVHELKGFEKVYLEAGESREITIPLDERAFSYWSERFDDWRIEKGSYGIEVGTSSRDIIGRRDVEIDGDGRRMPLDEWSNLEEWRQDPIGAQIVRRMIEEGENGRLPVIPQDNTAVMVFLDTMPINSLSMLIGPGGDRLTTYLLEQYRQAKA

SEQ ID NO: 803 - protein, 844 aa, Penicillium italicum
MVQEKDISTADAVLASLTLEEKVSLLAGGSFWSTAAIPGKSIPSVKFSDGPNGARGSEMKGGPTSACFPCAVSLAATWNLDAIKEVGKALAEETKTKGANLLLGPTVCPHRHPLGGRNFESFSEDPFLSGMMASEYIVGLQGQGIGAAIKHFAANEQETFRNILDVTVSMRALREIYLKPFEIAIKQAKPWALMTAYNSVNGSHADCNSTLLQQILREEWKWDGLVLSDWGGTNSLVESLTAGLDLEMPGPPTVRKSELIMQALESNAIPESIINDRARAVLRFVATTTGFGPQKECKEYADDRPSHRELIRQVGREGIVLLKNEDDILPLKHTASAGSLTKIALLGFADEALIHGGGSAAVNAHHRITLAEGLRDAFKDRGLEIECAKGAHTLRKLPLMVDHVKNDEGKPGWSMQFLHPKDPAGVWRHIGEPSYTPTAPGNEGMTVRATTQFCVPASGRHYLSLSGLGPSSLKINGDEVYRQDGNCPDLMAFILTSYADIPVQYDFVAGQTYHIEVLSNPLEAYNGPSFMNGRAGFSVGFMLEAERDADLLAEAVTLASRSDIAIILTGNTAEWEAEGQDQVGFHLPRDGSQDRLVSAVAAANKSTIVVNCTGGPIAMPWIHEVKALLQAWFPGQEAGHSIADILVGDRFPSGRLPVTFPRAIEDTPAYRNFPGGFEEDGRARVRYEEGVFVGYRFYDHTPEQREKVLFPFGYGLSYTSFTLHDISLATLKDHHENHIEVRVSVSNVGKRRGTETIQVYVGRADHSEQHPWKTLVAFAQVSLDAGETREMSLELSRRDLAFYDESTEHWVVEASDYLVHVGTSVFEIASTERLHIPERIDYAL

SEQ ID NO: 804 - protein, 810 aa, Microbacterium trichothecenolyticum
MTETATSTHTDSVQHLVPLLDRLTLEQKAALVQGADFWTTVPLPEIGLRAMTLSDGPAGVRGPRWDEREPSLNLPSGSALAASWDVDLAYRYGAAAASEARRKGVDVVLGPTINLHRSPLGGRHFECFSEDPELTAELAAAYVRGLQDNDVAACPKHYVANDSETDRFTVDVRVDERALRENYLAPFERAVDAGAWTIMSAYNAVDGVTMTENDLLETPLNSEWGFDGVVISDWTAVRSLDSVPAAQDLAMPGPAPAWADLVAAIRDGRLNEADLDRKVLRVLLLAQRVGALGEREPREPAPLDGPAFAREAAIEGTVLLRNEGVLPLDASSLGRVAVIGQNAREARTQGGGSATVIPESVVSPLDAIRAAVPGADVGFEIGAVVQEGVAEIPLAHLTNPATGEAGIRVAFFDADGTELFAENRRSTALVWFGGDAPIAASATVVFETLYTPAETGDIELGFAGANPGKLYVDGQLVLDDSPVIEGTDLGAAFLNPPSITATVAVEAGRETAVRVEFSRESHGALSGALSATLGIAPERTDADELIARAVAEAAASDLAIVVVGTNSKVESEGYDRTSLDLPGRQDDLVRAVAATGTPTVVVVNAGSPVVLPWAEDVAAVVQGYFGGQEFGHAIADVLTGAAEPGGRLPTTWPAALADVPVTEVVPTDGRLEYREGLHIGYRAWLKADAVPAFAFGHGLGYTTWSWGAAQRTGDTVEVTLANTGHRRGKQVVQVYAERPESAVERPERWLVGFATVHAAPGETVTATIPVPARRLAHWAGEWTVESGAYTLRAGASVADLPLSLEWRIAS

SEQ ID NO: 805 - protein, 753 aa, Unknown
  uncultured Clostridium sp.
MLDIEKLIDEMTLEEKAGLCSGDDMWHTKAVERLGIPRIKMSDGPHGMRTFDDNGKVIPAVCFPTGSALAASFDTELVERVGAAIGEAAKTNGVHTVLGPAVNMKRSPLCGRNFEYLSEDPYLAGKLGSAMVRGIQSKGVGACPKHFAVNNQETRRMSVSADLSERTLREVYLPAFETIVKESSPHTMMCAYNRINGTYASENEHLLDEILRKEWGYQGIVMTDWSAMNRRPRALQAGLELEMPSSAGVNDEKIVEAVKAGDLSIEVLDEAVRRLLTWINAELQGRTESVCDLGVQRELAREAAGKSAVLLKNDDVLPLRKGDKIAFIGGFADKPRFEGGGSSHVSVEHMVNAIDAAKDIPNITYTEGFNTDDALSDYELVAEAVRIASEADVAVIFAGLPAAFESEGHDRTTLEIPESQNKLIAAISAVQPKTVVVFHGGSPVYMPWRKDVAAILYMYLGGQEVGSASVDLLFGDRNPSGKLAETFPLKLEDTPCYMNFPGDGNNAEYSEGIYIGYRWYDKRKIAVEYPFGFGMSYSDFIYRQIRSANSRITDTDTLKIYVDVQNRGEYAGEEIVQLYVQPSKARQGVRPVKELKGFKKMMIAPGETKTVCFELDKRSFAEYKPEISGWYAATGEYTILAGGSSDNLPLQVKVYVESTDTIPLVYNDYTTIGDLWDSGLDVNEVLDALDAKQTDLSALGLPADKMDRAIHMEEVKRGMPIHAVISMGGRDMNKIYQALLKVDGLEGKENIPL

SEQ ID NO: 806 - protein, 829 aa, Bifiguratus adelaidae
MVSNSIDIEGILSQLTLEEKVSLTAGKDFWHTVAIPRVGIPTLKVSDGPNGARGGKFFDGTPAACFPNGVCLAASFNTDLVEQVGKALGQDIKSKNAHVLLGPTLNIHRSVLGGRSFEAYSEDPLLSGKMTAAYVRGLQSEKVAATPKHYVCNEQEFERLSISSEVTDRALREIYLSPFEIAIRESDPWALMTSYNRVNGTYASEHPNTLKKILREEWGFDGLVMSDWTGVYSTADAINNTLDLEMPGPSRWRADKLLKAVKDGQVSEETITESVRRLLQLFVKVGRFEDPTDPLTTPEQGINKPEHAALIRRAAGEGIVLLKNENDALPISTDSVKSIAVFGPSAVKPIAMGGGSAHVRAHYVITPLEGIQKAAGPKVKVTYMQGATTNKNVPLFEQTVETPTGKIGTQIEYFKLNSFHEAPFKVDVFPSARWINIEKPEGIESNIMSVRATAVYTAPVSGIYIIGVCIQGQGRLLLNGKELITGNITFKPGEMLGEHKYELRREVSLEANKKYTVAVELSVQKEEEWAGFQFGIQEPLDHDAIAKAAALAAESDIAIVFTGLTDEWESEGFDRENMDFSGNQVELVEAVAKFNKRTIVVNNTGSPVTLPFLPRIQALLQAWYPGQECGNSIADILFGKTNPSGKLPTTFPHRLEDTPAFLNFPGENGKVLYGEGIFVGMRYYEKLNLDVAFPFGFGLSYTTFELGNVSISSTKVSSEKDLPITVSVHVKNTGAMDGAEAVQVYVRDVVSSLVRPIKELKAFAKIQVQAGQTQKVEISLDKHAFGYWDDKKYTWIAEAGDFEVLVGTSSQHIHGKAAVTLTNNIEWLF

SEQ ID NO: 807 - protein, 770 aa, Paenibacillus thiaminolyticus
MKTVTESDMILTQLTLEEKASLCAGLNMWMTKSVDRLNIPAIAMYDGTNGIRKTASMEELGIFGDNVPATCYPTGSAIGSSWNVELLRELGVALGKEGRELDVEILLGPGINMKRTPLGGRNFEYYSEDPCLTGELGAAFVDGLQSQGVAASVKHFACNNQEYEKMITSSEVDERTLREIYLSAFERIVKKANPWTIMCSYNLLNGEYTSENEFLLKKILREEWGYDGVVLSDWTAVDNRVKGIKAGLDLEMPGPAHYNTKAIVEAVQSGELEERQLDTCVRRILELVRRTREHRGVELPSAEERHKLARRAAAESMVLLKNDKGLLPLQPERLSSVAVIGRFAKQPRIQGAGSAKVTPTQVDIPWDEMQDIAGERLELRYAEGYAQDSPPDTIDECLIEESVALARRSDVAIIFAGQPESSESEGLDIASIDLPCHQSKLIQAVADAQPNCIVVLSSGTALVMRPWIDQVSCVIQGWLSGQGGGRAIAEILFGLVNPSGKLSETFPVKLSDTPSYLYPRGENGKLFYREGLFTGYRYYDRKQLEPQFPFGHGLSYTTFEYVSLEAVQTGDEVHVTCAIRNTGTRSGKEIIQLYVNDEECLWQRPDKELKAFAKVNLEPGETKMVHFTLDRRDFSYYNTKQQRWVADMGFFNILAGSSSRDIRLRCRLHCDFGTQQAVQFHTFSLLSDWLRYSHSRAVLEEYLADMNRHAEEAVILNEEFIGFWNDFPLIKIIQMFGQQWLQDTSPHLVIEEMLERVARCQPADEELPER

SEQ ID NO: 808 - protein, 810 aa, Microbacterium lemovicicum
MTTESTVATSDATSHLLPLLAQLTLAQKAAFVQGADFWATVPLPEIGVRSMTLSDGPAGVRGPRWDEREPSLNLPSGSALAASWDIDLAYRYGAAAASEARRKGVDVVLGPTINLHRSPLGGRHFECFSEDPELTAELGAAYVRGLQDNGVAATPKHYVANDSETDRFTVDVRVDERALRELYLAPFERAVEAGTWSVMSAYNSVDGVTMTENDLLETPLNSEWGFDGVVVSDWTAVRSLDAVAASQDLAMPGPAPAWADLVAAVEDGRVSEADLDRKVLRMLLLAERVGALEGAPGIEPAPVDGVAFTREAAVEGTVLLTNDGTLPLDAAALRSVAVIGHNALEARTQGGGSATVLPEHVVSPLEGLRTALPDAAVSYEIGAVVQEGVAELPLEQLQNTVTGEPGLRVSFFDADGLELFTEDRRSTALVWFGGDAPIAASSSVVLETVYTPAETGEIQLGFAGANPGRVSIDGVEVLAETPLIEGTDLGAAFLNPPSSTAAVRAEAGRPLRLRAEFALSSGGPLAGALSVTLGIAPETTDPDELIARAAAAAASADVAVVVVGTNSKVESEGYDRVDLDLPGRQDDLVRAVAATGTPTIVVVNAGSPVVLPWAGEVAAVVQGYFGGQEFGSAVAAVLTGAAEPGGRLPTTWPAALADVPVTDVAPQDGVLAYTEGIHIGYRAWLRADAAPAFPFGHGLGYTTWSWGAVQRDGDALDVTLANTGARAGKQVVQVYAERADSTVERPVRWLVGFATVRAEAGQTVTATIPLPARRFAHWSDGWQVEGGAFTLRAGASVADLPLTMEWSIGD

SEQ ID NO: 809 - protein, 751 aa, Rhodococcus erythropolis
MELTAATGRNDVTENYVDGLSLEEKASLTSGSDFWHSQSVAGIESILLTDGPHGVRKQPEGGDALGLGHSIPATCFPPAVGLGSSWNLDLIRQVGEALGDEAKAEQVSVLLGPGINIKRSPLCGRNFEYVSEDPFLSGRVAAALITGIQSRGVGTSLKHFAANNQEHDRMRVSADVDERTLREIYLAGFEYAVKTAAPTTVMCSYNKINGVYSSQNHWLLTEVLREQWGFDGLVVSDWGAVNDRVAALAAGLDLEMPPTGTDTQIVDAVRGGDLDESVLTTAAERLSTLVKRTAAARTEGHTYDVERHHELARTAAAESAVLLANDGELLPLTPGGQTVAVIGEFACSPRYQGAGSSQVVPTKLDNALDAILDLEGADRVTFAPGFTFDGTPDDHMVTEAVDAARRADVAVLFLGLPSATESEGFDRTDIELPADQIALLEAVHGANPNTVVVLANGGVVSIEPWKDHAAAILEGWLLGQAGGSAIADLLFGITNPSGRLTETIPLRLQDNPSYLHFPGSQQHVRYGEGLYVGYRYYDSALREVAYPFGFGLSYTTFDITDTSVDAGKNSAEVTVTVRNSGDRSGSTVVQVYVHDASASIDRPAQELKGFAKVHLDPDESATVTITLDTRAFAYWSVAAQDWAIEPGDYEIRVGFSSRDIATTDTITLAGNVGVGTLDAMSTIGEWLAHPVGSAVLGAAMAAAAGDGAQAVSPEMMALAGSMPLGKLATFGLGITEEQVAQLVAAAAQPGS

SEQ ID NO: 810 - protein, 745 aa, Cutibacterium avidum
MTPAEITDLISQLTLEEKASLCSGGDSWHLQTVEKLGIPGPMVTDGPHGLRKVADGSMAGIYDSVPATCFPTAAGLASTWDPELVHDIGVALGEETRAESVSVLLGPGINMKRSPLCGRNFEYFSEDPVLAGTLATELVRGIQSQGVGTSLKHFAANNQETDRLRVNAEIDERTLREIYLPAFEMVVKQADPWTVMCSYNAINGVYSSQNRWLLTELLHEEWGYKGLVISDWGAVVNRVEGLRAGLDLEMPGDAPRNDARIVEAVRSGDLDEEILDTAVARILSLIARASAAMADPGSYDIEAHHQLARRAAAASVVLLKNDGDVLPLIDPDDVVVIGEFARTPRYQGAGSSKVNPTRVDTALDSLRQTWDDVPFAPGFTLTDHPDPQLADEAVSLSRGKTAVLFLGLPAVAESEGYDRTNTDLPTDQIDLLARVRKVASHTIVVLSNGSSVGTAEWDDQADAIVECWLGGQASGSGVIDVLTGKVNPSGHLAETITRKLSDIPAQLNFPGEFQHVTYGEGRYIGYRGLDATEREVAYPFGHGLSYTTFAYCDLDLLVRPVSDETAQDETVLTVSFTVSNTGDRAGATVPQVYLGFPDATVDRCVRELKAFLRVELDPGESRSITIDLTRRDLSYWDILLHSWTVEPGTVRVEVGISSRDLPLTGEVILDAPTVRHPLRRDSTVAEWMDADEEFAAKVRRATEQTGIDLDSDPTTAAFILAMPAYKMLQMAPIMTPEELDKMLGD

SEQ ID NO: 811 - protein, 824 aa, Clavibacter michiganensis
MDPHDTPTPLDPDVTALEELASRLTLEQKVQLITGRDFWTTWPVEGIGLRRMLVSDGPSGVRGEVWDERSPSLNLPSASALSSSWDTGIAARYGRASAVEARRKGVDVVLGPTINLHRSPYGGRHFEAFSEDPLLTADLAAAYVAGVQENGVGATPKHYVANEYESDRFTADSVVSERALRELYLAAFEKAVVESRAWLVMSSYNSINGTTSTENDLLETPLNSEWGFDGVVVSDWTGVRSVDAARASQDLEMPGPVGAWGDVLLDAVRDGRVPESDIDRKVIRLLRLAARVGALEGFDAVAPAPVAVEDGVAFARTGAAAGTVLVRNAGGILPLDASALRSVAVIGHNAVEARTQGGGSATVIPEHVVTPLDGIRDALGDGVDVRYARGAVVQKGIQELPLAEIRNPRTGEPGALVRFLDADGGEMFTEDRRATTLMYFGGDAPTGTAAVIGITTRWTPATTGEVLAGFSATGRGRVCADGALLREDGAAPAGMDLGASLLSPPSISAPLQATTGQPVDLRVEFELTSAPGGLAGILGITMGIEADESAPERLLDEAVEAATGADVAIVVVGTNAQVESEGFDRDSLALPGRQDELVRRVAAANPRTIVVVNSGSPVLLPWRDDVQALVLAWFGGQEFGGALADVLFGDVEPGGRLPTTWPATEEDVPVRSVTPVDGRVVYDEGIHVGYRAWLRSGATPAYPFGHGLGYTTHAIDDLRVAEDGAGGITATVTVTNTGDRAGKQVVQAYLSRAGSAVDRPVRWLAGFAAVQLEAGASAEVDVAIGARSFAHWDGGWQREPGAFRLHVGTSVVATPLEAEVDPAA

SEQ ID NO: 812 - protein, 749 aa, Unknown
  Microbacterium sp.
MNPDLTSLTLEQKAALLSGRDFWSTKEIPEAGIPSIVLTDGPHGIRRQTGGSDHLGINAAEPSTCFPPAVAVGSSWDPEIARQVGAAVGREALAFGVSVVLGPGVNIKRSPLCGRNFEYYSEDPLLSGVLGAAHVAAMQEVGPGASVKHFAANNQEHERMRISSDVDERTLREIYLPAFERVVTEAQPATVMASYNKINGVYASQNPWLLTDVLRTEWGFAGAVVSDWGAVSDRVAAVAAGMDLEMPGSGGSTDQQIVDAVRSGRLDESVLDEAVRRVVQLARLPHTASGELDVEGHHALARTLAADSIVLLKNEQATLPLGAPSRIAVVGAFAVEPRFQGGGSSHINATRTDAALDSIREHAGARGIGVEYAPGFVLADAEGAEQHRREAVSVASGAGVAIVFAGLSDREESEGFDRTTLSLPGAQIAVIREVAAVAERTVVVLSNGGVVSLEGWHDEVDAIVEGWLLGQAGGSAIADVLFGVVNPSGHLAETIPLRLQDNPSWNNFPGEQGHVRYGEGVMVGYRHYETAAQPVRYPFGYGLSYTTFETGDLRVETTGSDTAAVTVTVTNTGAVAGKHVVQLYVSTTAGPVRRAARELRAFTKVRLEPGESRTVEFALDRRAFAYWDIESAGWVVPAGDYAIQIGEDVSRIVAEQTITLAGDIRVRPLTLESAVGEWFAHPVVGPVLMQGLSAGMTDEQRKHSEKNPDELKMVESMPMRQFLAFTGGAFPPEALEQLMQLSRASAVAV

SEQ ID NO: 813 - protein, 757 aa, Bifidobacterium actinocoloniiforme
MTDTNASRPQPAFPKASDLSLEEKASLTSGGDAWHLQGIESKGVPGYMITDGPHGLRKTEEKTGAVDLNESVPATCFPPAAGMASSWNPQLVEEVGRAMGQECIQEQVAVILGPGVNIKRNPLGGRCFEFWSEDPFLAGHEAVGIVSGVQSQGVGTSLKHFAVNNQETDRLRISARVSQRALREIYLPAFEYIVKTAQPWTVMCAYNQINGVHASQDHWLLTDVLRKEWGFTGIVMSDWGADHDRVASLNAGLNLEMPPSYTDDRVVSAARDGSLPVDQLDSMAQGMIDLAAKAAPAMSRTDYRYSVDEHRDVARRAARESAVLLKNEGALLPLDPNGTVAVIGEFARTPRYQGGGSSHITPTAVSSFLDAAGERGAKVDFAPGFTLDDEPQDESLTSQAVESARKAKSVLLFLGLPEQEESEGADRTNLDLPAKQLDLLKAVSAVNPHVAVVLSNGSVVSIAPWRDQAQAILEGWLLGQDGGRALADLIYGDYSPSGKLAQTIPMDLADDPTMLNWPGEEGHVDYGEGVYVGYRYYDSFHKPVAYPFGFGLSYASFELSDVHVTARQGNTATVSVRVTNTSDRDAAETVQVYVAPGKAKVARPSHELKAFRKVFLKAGESQEISIDLDERAFAYWSETHAGWRIEAGDYGVEVGTSSRDIAATVTISLPGDGKRLPLTEWSTMDEWREDPVGGPIMERMEALGRSGELPELPIDNASAAIFLASMPINSLFVLMGGNGSKLTNYLLDNYAQATHAA

SEQ ID NO: 814 - protein, 754 aa, Bifidobacterium reuteri
MSETNATPTYPSVKDLTLEEKASLTSGGDAWHLQSVEHKGIPGYMITDGPHGLRKSLASNTSETDLNDSVPATCFPPAAGLSSSWNPALIRKVGEVMGEECVQEKVAVILGPGVNIKRNPLGGRCFEYWSEDPYLAGHEAVGIVEGVQSKGVGTSLKHFAANNQETDRLRVDARISQRALREIYLPAFEHIVKTAQPWTIMCSYNRINGVHSAQNHWLLTDVLRDEWGFKGIVMSDWGADHDRVASLNAGLNLEMPPSYTDDQIVYAARDGRIDPAQLDRMAQGMIDLTNKARAAMSIDGYRFDVDAHDEVARQAAVESIVMLKNEDAILPIDPAGGKKLAVIGEFARTPRYQGGGSSHITPTKMTSFLDALDERGIKADFAPGFTLDLAPADSALTLEAVETARDADVVLMFLGLPEEAESEGFDRTTLDIPAKQIELLRQVAAENPNVVVVLSNGSVVTVHPWADASKSILESWLLGQAGGRALADVVFGEASPSGKLAQSIPMDINDDPSMLNWPGEEGHVDYGEGVFVGYRYYDTYNKAVDYPFGYGLSYATFEIGDVAVAKTGANTASVTATVTNTSDTPAAETVQVYVAPGKADVARPVHELKGFEKVFLGAGESKTVTIELNERAFAYWSEKYNDWHVEAGEYTVEVGVSSRDIAASIAVTLDGDGKSMPLNEWSTFGEWSADPVGAKVVEAVGAAGERGDMPKLPDNDMMRLFLNSMPINSLPTLLGESGKDLTAFMLDEYAALTK

SEQ ID NO: 815 - protein, 794 aa, Propionibacterium freudenreichii
MPGQPARAASVPESEQRRQAHQIVSRLAPDEKAALLSGADAWHTVGLGRLDVASVTLADGPAGLRKVADPEVGVMRFDNAVRATAFPVPAALGNSFDPDVVAMVGRAIGEEAREQSVGVVLGPGINIKRSPLGGRNFEYYSEDPILSGQLGAAWVQGLQSCGVGACVKHFAANNQETRRMTADALIDEQTLHEVYLRAFEHVVRTADPWTLMCAYNRVNGTYCSESHWLLTELLRDQWGFDGLVVSDWGAVLDRVRSLAAGVDLAMPPDLARDAADIRSAIARGTLSPQGRDEACARVVELALKVTQGTTRELGRRVGAHHHVAREAAGRSIVLLRNRAVDANNHGSANPVLPLAHGAKLAVIGEFAANPRFRGGGSSQVVPMLLDIPLDEIRGRADEPVRYEAGFLLSGESDDELADRAVEAAEEAEVAVVFVGLPDDAESEGLDRTSILLPAVQTGLVQRIAAANPRTVVVLTNGGVVQLAEWSSEVPALVEASLLGEAGGSAIADMLFGEVNPSGRLAETIPLRLQDTAAYFNFPGDRNQVRYAEGLHVGYKWYNASQLEVAYPFGHGLSYTRFSYNGLHLAADGSGLHARFTLRNTGARVGREIPQLYVALRASAYRRAGFEFKASAVVQLAPGEQREVTLSVPPADLGVWDADLHRWLVEGGDYDVAVGASSRDIRLNGIVTVRGEARPRTLDRNSTVSEWLSSPLMAQFLAVQLANLATDPAATDGAGPRDPQEFMRLAHDLRLSQLPVLAPQLHISHEQIDQLIAAAGMDARPRPRRIDDSDSGART

SEQ ID NO: 816 - protein, 801 aa, Microbacterium hydrocarbonoxydans
MTASTDHLRPLLEKLSLEQKAALVQGADFWTTVPLPEIGLRALTLSDGPAGVRGPRWDEREPSLNLPSGSALAASWDVDLAYRYGAAAASEARRKGVDVVLGPTINLHRSPLGGRHFECLSEDPELTAELGAAYVRGMQENGVAATPKHYVANDSETDRFTVDVEVDERTLREVYLAPFERAVEAGAWSVMSAYNSVDGVTMTENDLLENPLNSEWGFDGVVVSDWTAVRSLDAVAAAQDLAMPGPAPAWADLVDAVHDGRVDEADIDRKVLRILLLAERVGALEGADAVAPAPLDGPAFAKEAAVEGTVLLQNSGVLPLDLAGLTKVAIIGHNAKDARTQGGGSATVLPEKVVSPLDAIRAALPAAEVSYEIGAVVQEGVAEIPLASIENPVTGGPGVRVSFHGADGTELFAEDRRATALVWFGGDAPIGASRTIVLETRYTPAESGEIQLGFAGANPGRIFVDGELVLDDVPVIEGTDLGAAFLNPPSITSAVTVEAGRAVDLRAEFTRESRGALDGALSVTLGIAPERTDPDELIARAAAAASAAEVAVVVVGTNSKVESEGYDRVDLDLPGRQDDLVRAVAATGTPTVVVVNAGSPVVLPWAGEVAAIVQGYFGGQEFGHAIAEVLTGAAEPGGRLPTTWPAALADVPVADVTPVDGRLVYAEGLHIGYRAWLKDDVQPAFPFGHGLGYTTWSWGTAQRHDDTVEVTLANTGEREGKQVVQVYAERADSTVDRPARWLVGFAVVHAEPGRTVTAVVPVPARRLAHWAGEWVVEPGAYTLRVGSSVADLPLSVEWVQA

SEQ ID NO: 817 - protein, 815 aa, Unknown
  Pseudonocardia sp.
MAHVDEELLGTLIATLDLERKVRLLTGADFWSTPAEPAIGLRRMVLSDGPSGVRGESFDEREPSLSLPSSSALGATWDPAAARRYGSALGAEARRQHADAVLGPTINLHRTPYGGRHFEALSEDPLLTAELAAAYVEGLQAHGVAATPKHYVANDAETERFSVDNRVGDRALRELYLAAFEPVVTRAGAWAVMSAYNAVNGTTMSENPLLAEPLTGEWGFDGLVMSDWGGARSTEASARAEQHLVMPGPVSAWGARLVEAVRDGRVGEDVIDGKVRRLLRLAARVGALDGVPPQVTEPPPAEDGAAVARELAAAGSVLVRNTRADGAAELPWDHAVPGSVAVLGHNAALARTQGGGSATVRPAAVVSPLDGLRAALGADRVRYRLGAQVAEGVQPFDPASITNPVTGGSGLRAVFRDVGGAALRTEDRLSSSLIWMGAEIPEGTDHVEIALRWDAPAGAHRLGAAAVGHVVLVAGGTTVLDADGVLTGDEGPGAAIFEAPSVTAGVTTDGPVDLVLRFRPSGQEAGMPLVAVTVGEETVVDDPDAEIAAAAALAAGTDVAVVVVGTNDRIESEGFDRSTLALPGRQDDLVRAVAAANPRTVVVVNSGAPVLLPWRDEVAAILLGWFGGEQFGEAVADVLLGAAEPGGRLPTTWPGTGRERSVLSGVPSDGVLRYDEGVHAGHRNWLRHGETPAYPFGHGLGYTTWTLDGMSVGRWSADGIDVTVTLTNIGDRPGRQVVQAYLSRDRSDVERPARWLAGWAVVDAAPGTTTVTVPVSRRAFRHRTGTGWATEPGTWTLHLGFSVTDTPLAAEVTTT

SEQ ID NO: 818 - protein, 955 aa, Tuber aestivum
MQAPLSSDRKMAIKALPKYLQREVNEALEGLNLEEQVSLLSGADFWRTVEIQGRVAGIKTTDGPSGARGQFFSNGTKAAFFPCGVSLAATWDTSLIHQIGKALGEEAQSKQANVLLAPTVCNHRSPLGGRNFESFSEDPYLSGKLAAAYVNGVQSRGVAVTMKHFVANEQETKRFTVNEIIEERTLREIYLKPFEIAMRDAGPWAIMCSYNAINGQHADVNDLTMKQILRKEWGYDGLVMSDWGGTHDTVDSIKSGLDLEMPGPAHRRGQSLLKAIKESNNDPELLAAVKTGARHVLELIARTGKWGRFGEEPESANDKPEHRALIRKAGTEGIVLLKNENNALPIPTSVKKIAWIGPNANECIAGGGGSANLNPHYLTNPLDSIRGAVKEHNIEVNYEIGCQTEKWVKAFPITEGGVKTSPARGEDGMILEFFEGRRCQGEVAEARIMKTSTIFLVDGKPASLGDKDYSVRLTAFLTPQVSGEHILGLGAVGPTKVYLNNELFLDHTHWATTGELFFTSGSEEVTKKVVLQAGEWYKIVAESTTKSPDQKLPDMDNDSLDFASAVGIRLGLDLVRDMQEYISRAAALASESDVAVVVVGMNNEWESEGYDRHSMDLPGRQNELISAVAKVNPQTIIVNQSGCAVSMPWLEEVQGLLQVWYQGQESGNALANVLLGKKAPGGRLPISFPKRVEDNPSWGNFGDGATKSEIQYSEGVFVGYRHYTSRDIPVLFPFGFGLSYTTFSISLVGFTGGKNTLAPGTTATVEMAIKNTGKVTSSETVQVYISPRTGSSAERPAMELMGFAKAELQPREEKFVKVELDEFAVGYFEMSVGKWRAERGVYEVSVGRSVEDVILKLEVIVEETKAAKPRLYLGSPGPSASLFVTRYFYRCEHPSLLRAPGRWSPAPTELTDRYTPLTQRPQFAPLAPNFQILQRVRRRQILPRENRKQWTPSEN

SEQ ID NO: 819 - protein, 776 aa, Propionibacterium australiense
MTTVHPDDYADRASELVAAMTLDEKASLTSGADFWNLKTVERLGLGAVMVTDGPHGLRKATNDAEIGIGQAVPATCFPTAAALGSTWDDELLEQVGAALGEEARAAGVAVVLGPGVNMKRSPLCGRNFEYFSEDPLVAGRAGAAMVRGVQSQGVGTSVKHFAANSQETDRMRIDARIGERALREIYLPAFERIVTQTRPWTVMCAYNKVNGTYASQHPWLLTTVLREDWGFGGLVVSDWGAVDQRVPGLAAGLDLEMPASGGVTDEQIARAVRTGELDEAVLDRAVQRIVALILAAQAVEPGTGFDTDAHHELARKAAAAGAVLLRNEPVDGSPVLPLDARDITGQAPLVVIGEFARTPRYQGAGSSQINPTRLDSALDALREQLGGAVRFEPGYRLAEATGMPGQELTDDELADRAVEAARGATVVLFAGLPAAVESEGYDRDDIELPNAQTTLIERVSAVAARTTVVLSNGSVVSVASWREKVDALLECWLGGQGGGSATADVLLGRSCPGGHLAESIPLALSDVPAQLNFPGSHSRVDHGEGVFVGYRGLDTMGREVAYPFGFGLTYTTFELTGVQATPVVTVADGTGLDETVAVVRGTLTNTGQRTGAQVVQLYLGRHEASRVARAPRELRGYEKITLAPGQSAPFEFALSRRDLSYWDEGTGCWQVEPGAYRAWVGFSSRDAAAVLPLQVTAPEPASPLGKDSTYAEWMAHPVGGPLLRTDARAFVDDMASSGAYELFAAMPLERLVRLPGSLLAPEDYLTLLDRAQAGQD

SEQ ID NO: 820 - protein, 867 aa, Unknown
  Fusarium sp.
MTQPPTDAKLLELLSQLTTSEKISLLAGKNSWETQNIDRLNIPSLKVSDGPNGARGADFLDGRTAACFPACVSLAATFNRKLARRVGVALAQETQTKGAYVLLGPTVCPHRSPLGGRNFESFSEDPLLAGELASEYVLGLQSERVGATVKHYAINEQDTRRFTVNETVSDRAMREIYLRPFEIIIKKSDPWCIMTSYPKVNGHYVDDQTTLLKDILRDDWGYKGLTMTDWGAASAAVDAGIRNGLDLEMPGPPHRRKGDVVQKLIDDGKVDLKDIDEHVLNILKLLRQTGKFTDRREPVPEYSVSRPEHERLIREAGAEGMVILKNTGNTLPLKASSLKNIAVLGPLAKQTAAHGGGSASLNCHYKVSPFDAVTSRLGDSKVSYSKGAHVFRTYPDFTAGAVNRNGNPGFICDFFKTLDMSDKAFHTSEYPRGSFMSIMNAEIDDAKAVRMTTTYTPDVSGKHYLSFSGMGPTKLFINGVFLGEIKETEEAMMFFLGAQEEEHVQYDFKAGQKYEILVESTISPVPNAELFLAEDKLAVHLGFIEQQEMEADVLSESVELAKQADVALIFVGNTPQWETEGQDMATMALPADGSQDKLITEVAKVNPNTIVVIGTGVPVELPWLDQVAAVVQTWYGGQETGNAVLDVLLGEVEYVEGVNVGYRHFDSQYGTEKEVLFPFGFGLSYSTFEVSGTVLSGALSEGDANSEVAITTSVCNTSDRAGSEVVQVYLAPPKGAQSKGRPPKALVAFDKVHLAPGEKKELQLSFKRDGAAFWSEDDKSWRVEAGDHEVYVSTSSSPQDIKSTHTLSVPQGFTFNAYDILGVISKKKCNQRCGFFNLAITLDGMWCKYHLIRVPLVEKLSEHWGLS

SEQ ID NO: 821 - protein, 805 aa, Nectria haematococca
MTPPYVDIDHILGSLTLNKKISLLAGESDWQTVGIPSKGVPAVKVSDGPNGARGASFVNSTTAACFPAACCIAATFDSDLARDIGEAMAEETRSKGARCLLGPTVCIHRHPLGGRNFESFSEDPFLSWKLAAQYINGLQSQGVSATIKHFAANEQETQRLTVDTVVGERALREIYLRPFEIAVKEANPWAIMTSYNLLNGEHADSNKYLLQQVLRGDWGWEGLVVSDWGGTNSTADALNAGLDLEMPGPTRWRKQEAVLEAIRAGQLTEETIDQRVKQLLAFLERLGCFRDPRIPDEQAINDPRHRSLIREVGSRGLVLLKNDANILPLKPAELHGKKIALLGHAKTALAHGGGSASIVAHYKVTPWDALKNALGDQVALSYAKGADTLRYLPPVTTGVLDLDGNPGFTYKRYEPNNPVPVEIKQMHPDSFVSVFASVGFRDCDVSLEGLFEVHETGEYYFSCAGLGPSKLLIDDQLVEEQTDNYPDAMGFMFGGAFSNTIKVHLDGGRKYKISAHTSPPTPKEGEVEDMGLLEGHVGLQVGFAPALQLDWDYTAEAVHLAQETDMAIVFTGHEPVWETEGKDQVSFHLPKDGSQDRLVSAVAEVNPNVIVVNSTGVPIAMPWLDKIKALVQSWYPGQECGNAIADILTGRTTPEGHLPCTFPRDIRDCPAYGNFPGQSVNKKLTVTYQEGVFVGYRHFDLLADDKINFPFGFGLSYTSFDLQDFSVQKTNNNTLDENAPKTDPKKQLAGFKKVRLQPQESQVVRIPIQDRDFATYDEAERRWAVRGGVYRFMLGSTFAPSHHIH

SEQ ID NO: 822 - protein, 786 aa, Unknown
  Actinoplanes sp.
MTDVDHLLDRLTLDEKVSLLTGQDFWSLPAMPRIGLRSVVMSDGPVGVRGTGWAPENPSIALPSPTALAASWDPELAVEAGRLLGQEARAKGVHVVLGPTVNLHRTPLGGRHFECYSEDPLLTGEIAAGFVRGVQEHGVGTTVKHLVGNDFETERMTVDVRIPERALRELYLAPFERVVEAGGWGVMSAYNGVNGASMAQNGRLQDEVLKREWGFDGVVVSDWRAARDTVGAALGGLDIAMPAMDNPWGPRLAAAVRSGQVPVEVVDDKVRRLLRLAARVGALGAPPVVTAAAVDGGEVAHRVAARSFVLTRNRGVLPLPPERTGGIAVIGALAQDARVLGGGSAQVAPPHVISPLDGIRRVFGDVAYAVGADPRPFLPAAQGPGWSAFTIDLGAYRFEVPTAAVRWLGDPPGGLAVPDVTTLELTTTYTPEIGGEHVFAVSGFGTFQLTVGGQELYRGSLHPPGTGRADLLLHPREQRFPVRLAAGEPVRLTLRQSFAPGTAHSAGTTLGHRPPGPDADGLIAEAVDLARHCDVAVVVVGTTEQVESEGFDRTSLALPGRQDELVARVAAANPSTVVVVNAGAPVLLPWADEVAAVLLTWFPGQEAGAALAAVLSGAEEPGGRLPTTWPRHETDCPVLTVQPRDGVVTYDEGIFIGYRGWRAAPLYAFGSGSGYTTWEYSGLTATATEVAVTVTNSGQRAGREVVQIYLSARDDGAVERPERWLAGFASVTADAGERVTVRIPLPERAFQVWTDGWRTLPGRYTVIAAHALDDPRLTAEIEKPQA

SEQ ID NO: 823 - protein, 826 aa, Streptomyces fulvissimus
MAAASSTSNSKALRREAVDTALAALGLDDKTRLLAGQDLWSLPALPAIGLRSLVMSDGPIGVRGVRWTAADPSVALPSPTALAATWDPELARRAGRLLAQEARRKGVHVLLAPTVNLHRTPLGGRHFEAYSEDPYLTGEIGTGYVRGVQDGGVATTVKHFVANDAETDRFTVNNTVAPRPLRELYLAPFERIVRNAHPWGIMAAYNQVNGSTMTEHRYLQNAVLRGEWGFDGFIVSDWLAARTTVGAITGGLDAAMPGPRTVYGETLADAVRAGEVDEKIVDLAVRNILLLAARVGALESAPPAVPAAALPATVDGDALAREIARRSFVLVRNEVHDGADALPLAPGTTVALSGALARDARVLGGGSALVFPDHVVSPLDGLTAALPEGALTYAVGADPSDELAIAEAGFDLTAVCRDASGAVLATVPLPSGQIQWIGADLPDGVTHDTLDTVEITGTFTPRASGEHTFGTRGTGSFALTVDDRPLFDGTQDRAPGTDPLGAFFNEPVERGRLPLTEGAPVRVSLSHRPGPGTGHPLKGVAFSLVHLAPLRDPDELIAEAVEAARSADTAIVVVGTTERVESEGFDRTDLKLPGHQDALVHAVAAVNPRTVVVVNSGSPVELPWRNEVAAVLLSWFPGQEAGHALADVLRGQEEPGGRLPTTWPVALADVPVSATTPTNGELPYTEGVFIGYRAWEKAGTTPAYAFGHGLGYTTWEYEDVSATPDSVTVRVRNTGSRPGSDTVQIYLAPAPAPDAPERPARWLAGFARVTAAPGGSVEVTVPVEARAYQVWDEEAYGWKTVPGTYEVQAARSLADVRATTTVDITA

SEQ ID NO: 824 - protein, 837 aa, Pestalotiopsis fici
MMTTDIEAVLKSLTLEEKISLLAGQNFWETVPVPGKVPHIKTSDGPNGARGADFTGGTRAACFPAASNVAATFDLDIANRIGQALAEETQSKGARCLLAPTTCIHRHPLGGRNFESFSEDPLLSGKLASQVIQGVQSKGVAATIKHFAANEQETERMSVDETISERALREIYLRPFEIAVKEAKPWAVMTAYNCVNGEHCDSNAFNFKVLREEWGWKGLVMSDWGGTNSTAEALNAGLDLEMPGPTNRRKIPDVLAAIKEGKTTERAIDDRARAVLEFIDRLKAFEDPTIPPEQAINKPEHQALIREAGAKGCVLLKNDNGVLPLSKDKVKGKKVAVFGLAKTPLAHGGGSASVNAHYKIAPWDALQEAVGDSAELVYSQGAHTQRILLPIGEDKSAGSIVGLDGKPGFTLQVFDNATQAIEETTHGHPSSSISPLGSKATLYKILEFVGDFTPTESGSHYLGCTGLGLTQVYVNDKLVYDQQKASPDAMGFLFGAISEDEFTYPFTAGNAYRIRVRSLPPIDVPGLEILNGRSGVRLGLQLASEHDADLQGEAVALAKDADYALVFTGHDPQWETEGQDQESFNLPRKGTQDALISAVAKVNPNTVVINSTGVAIALPWLEQVSSLVHAGFPGQECGNSIVDVITGAVNPEGRLPMSFPKRLEDAPAYGNFPGEYVNGQLKVEYKEGVFVGYRHYDRIGRDKVNFAFGHGLSYTTFATDSLRVSRKSETEFSASVNVTNTGKTQGGTLVQLYAGNATTSPEHPIKGLVAFKKIRLEPGQTQTVDLAVAARDLGFFDESRGQWVVPAGQYDFSLGESALDIIQTVKVAVEKELTSAP

SEQ ID NO: 825 - protein, 755 aa, Bifidobacterium bohemicum
MSEQNSERKATLPQAKDLSVEEQSALTSGTNPWSIGRVEGKGLPNYTITDGPHGLRKARDLDGMDVDAAVPATCFPPAAGMSSSWNPELIKKTGEAMGEECVQEQVAVILGPGVNIKRNPLGGRCFEFWSEDPYLAGHEAIGEVEGIQSKGIGTSLKHFAANNQETDRLRVNARISERAMREIYLPAFEHIIKNAQPWTVMCSYNRINGEYASQNSWLLTDVLRKEWGFKGIVMSDWGAVHDRAAALNAGLNLEMPPTHTDDKIVQAVRDGQVKPEQLEAMSQGMIDLVAKTQPAMEKGAAGYRYDVDEHDEIAREAAREAMVLLKNEDGLLPVKPGTKLAVIGEFARTPRYQGAGSSLINPNKLTSFLDALKDRGVEAEFAPGFTLDGDEQSQELTDEAVNAAESADTVLLFIGLPAEAESEGFDRTTLDIPAKQIEVLKAVSAVNKNVVVILSNGSVVSMPWADQAKSILECWLLGQAGGAATADVVFGDVNPSGKLAQTIVNNLDDDPSMLNWPGEEGHVDYGEGVFVGYRYYDSFHKAVTYPFGYGLSYTTFDISEVNAQKSGPQSVHVTAMVTNTGSMAGAEVVQVYVAPPACRVDRPVHELKAFKKVFLEPGQSQEVSFDLDSRAFAYWSERFEDWKVEGGSYGIEVGDSSRSIAQTVPVQLDDDGKRMKLTKWSTYGEWREDPDGNKILDKVISELEAKYGHAIIPDSQLIIMFLKSAPLGGMSMVLGANEAQDICERALAEYAKIGR

SEQ ID NO: 826 - protein, 744 aa, Bifidobacterium saeculare
MSDYPSVNDLTLEEKAALTSGTNPWSLGNVAAKGLPNYTITDGPHGLRKAQNTESMDVEENVPATCFPPAAGMACSWNPELVERVGEAMGEECIQEQVAVILGPGVNIKRNPLGGRCFEYWSEDPYLAGHTAVGIVKGVQSKGVGTSLKHFAANNQETDRLRISATISPRAMREIYLPAFEYIVKTAQPWTVMCSYNKINGVFSSQNRWLLTDVLRGEWGFKGIVMSDWGAVSDRVAALNAGLNLEMPPSNTDDQIVAAAKDGRIPAAQLDEMAQGMIDLVAKARPAMSRDGYRYDVDAHNEVARQAAVESMVLLKNEDATLPVAKGAKIAVIGEFARTPRYQGAGSSLINPTKLTSFLDAIEERGVAADFAPGFTLDDAAQDPALTEQAVTAAQQADVVLLFLGLPAAYESEGFDRTTLDIPAKQVEVLDAVAAANPNVAVVLSNGSVVSMPWRGRAKAILETWLLGQAGGAALADVIFGDETPSGKLAQTIIDDVNDDPSAMNWPGEEGHVDYGEGVFVGYRYHDTFRKQVTYPFGYGLSYATFDVHDATVAKTGPRTAEVTVTVTNTSDVAGAETVQVYVAPPKAKVARPVHELKGFAKVALEPGESKNVTIALDDRAFAYWSERFDDWHVEGGTYTVEVGVSSRDIVSRIDVEIDDDGKIMNLDEWSTFGEWLDDPIGAPILQHVLDDMAKEAGHPVIPDSALMVMFLRSMPLRSLSVILGEAGEQVAANLTEAYRKATA

SEQ ID NO: 827 - protein, 837 aa, Bionectria ochroleuca
MAPTDVNAVLSKLTLEEKISILAGADFWQTVPIPEKGVPALKTSDGPNGARGETFSGGVTAACFPAACSVASTFDVDIARRIGVALGEETLTKGARCLLGPTICGHRHPLGGRNFESFSEDPFLAGTLASQSVQGIQSTGVAATMKHYAVNEQETERLSVDEIVDERTMREIYLRPFERVVKEAKPAAVMTGYNQVNGSHCDSHEFLLKQVLRGEWGWDGLVMSDWGGVNSVAESLNAGLDLEMPGPTRWRKVDEVVAAVKAGKVSEETINDRAIHVLRFLERQNCFKDPTIPPEQAVNKPEHQALIREAGSKGIVLLKNNDNVLPLTKEKARGKKIALLGLAKESLAHGGGSASLNAHYKITPWDALQEAYKGENVEFTYAKGAHTLRQLPVITKNVVDVDGKPGFTWRSYHVGESQPYNTVGGHAKSEISLLDGLNMVNTSIELEGTFTASESATYYFTLSGLGPSSVAINGTVVFEQEDNCSDPMGFLLGGVASPLVKYEFESGKQYKILLKSTPPAPVEGVDLGILEGKVGVRLGNMSASEHDKDILTEAIDLAKAADYAIVFTGHDPSWETEGQDQHSFNLPKDGSQDRLVSGVAAVNQNTIVVNSTGVAVAMPWLDEIKSLVHTWFPGQEAGNSIADVLTGERNPEGHLTCTFPKRLEDCPAYGNFPGEYNGRQLTVKYAEGVFVGYRHFDRLPAEKVNFPFGFGLSYTTFGFSDFDVKPTAAGDEWTASVKVTNTGSVKGAIAVQLYVGNSKTSPENPVKSLVSFKKVTLAAGGSAVVELPAQGRDIAFWSQQEHKWVLEAGEYNFSVGKSAGDLVATATVQVGGKTYAP

SEQ ID NO: 828 - protein, 748 aa, Bifidobacterium pseudocatenulatum
MSEKTYPSINDLTLEEKASLTSGGDAWHLQGVEAKGIPGYMITDGPHGLRKSNSATTGEVDLNNCVPATCFPPAAGLSSSWNPELIHQVGEAMAEECIQEKVAVILGPGVNIKRNPLGGRCFEYWSEDPYLAGHEAIGIVAGVQSKGVGTSLKHFAANNQETDRLRISANISQRALREIYFPAFEHIVKEAQPWTIMCAYNCINGVHAAQDHWLLTDVLRDEWGFQGIVMSDWGADHDRVASLNAGLNLEMPPSYTDDQIVYAARDGRIQPAQLDHMAQGMIDLVNKTRAAMSIENYRFDIEAHDEVAHQAAIESMVLLKNDDAILPIAGDAKVTVIGEFARTPRYQGGGSSHITPTKMTSFLDTLTERGVDAKFAPGFTLDLEPADPALEAEAVDAAKGADVVLMFLGLPEAAESEGFDRETLDMPAKQIALLEAVAAENKNVVVVLSNGSVVTVAPWAKNAKGILESWLLGQSGGPALADVLFGKVSPSGKLAQTIPFDINDDPSTINWPGEEGHVDYGEGVFVGYRYYDTYNKAVDYPFGFGLSYATFEVSDVKAVKTGACTASVSAVVKNTSNVDAAETVQVYVAPGKADVVRPKHELKGFKKVFLKAGESAEVSFELDDRAFAYWSERFNDWHVESGEYTIEVGTSSRDIAGSAVVELDGDGKAQPLTEWSNFMEWRKDPLGSKVLEILRAEGEAGRMPVVPDNDMTRLFLDSMPINSMSVLMGADGKQIFEYMLEKYAELTK

SEQ ID NO: 829 - protein, 812 aa, Unknown
  Pseudonocardia sp.
MATVDEDLLTTLIARLDLDAKVRLLTGADFWSTPAEPAIGLRRMVLSDGPSGVRGESFDERSPSLSLPSSTALGATWDPELARRYGSTLGAEARRQHADVVLGPTINLHRTPFGGRHFEALSEDPLLTGELAAAYVEGLQAHGVAATPKHYVANDAESERFTVDNVVGERALHELYLAAFEPAVTRGGAWAVMSAYNAVNGATMSENPLLTEPLTGEWGFDGLVMSDWGAVRTTVASARAEQHLVMPGPVSTWGERLVAAVRGGEVDESVVDGKLRRLLRLAARVGALDGGPTPPPAPAPGDGATVARELAAAGSVLVRNTGELPWDASALGTVAVLGHNAALARTQGGGSATVRPAAVVAPLDGLRTALGGDRVRYRLGAQVAEGVQPFDPETVTDPVTGEPGLRAVFRAADGTALRSEHRLGASLIWMSGEIPGGAETVEVSTRWSPEPGAHRIGAAAVGHVTVSADGATVLDTEAVLTGDEGPGAAIFEAPSATAEITTDAPVDLVFRFRPSGGEAGMALFALTVGTETVVADPRAEVAAAASLAADCDVAVVVVGTNDRIESEGFDRTSLALPGHQDDLVRAVAAANPRTVVVVNSGAPVLLPWRDEVAAVLLGWFGGERFGDAVADVLLGHAEPGGRLPTTWPATGEERSVLSGRPTDGVLRYDEGVHLGHRNWLRHGETPAYPFGHGLGYTTWTLDDAVAGPWSADGVAVTVTLTNTGDRAGRQVVQAYLSRTGSDVERPARWLAGWAVVDAAPGTTTATVTVSRRAFRHRAGGVWATEPGTYELHLGFSVADTPLHATVEVVGEG

SEQ ID NO: 830 - protein, 827 aa, Unknown
  bacterium
MGTAHDLEQLIAGLTLEEKIALLAGDSLWTVPGIPRLGIRPLKVSDGPAGVRGSRIVPAAAFPAPVLLGATWDPELVERVGQALAEEAETKGAQVVLAPTINLQRTALGGRNFECFSEDPHLTARLAVAYVRGLQSRGIGACIKHYVANDQEFERHTVSVEVDERTLREVYLFPFAVAVAEADPWCVMAAYNRVGGIYCSEHPWLLTTILREELGYQGVVMSDWFATHSTIEALQAGLDLEMPGPPQWRGDKLREAVERGEVALEVIERSARRVLMLYQRAGRFAPGPETSEERAVDRPEHRALIREVGASGMVLLRNEGILPLDLSTVKRVAVIGPHVRRPAVGGGGSAFVRSHPVVTPLEALRESAPQCEFLVEEGAAIFKLIPPLEGEALGSEGAELAFFANPELAGAPVATIRVRTTDLIWLGEVAPGVDASAFSARLRVTMRPEESGRYVLGATAVGQVRVHLDGTLVLDNWTAPQPGRTYFGFGSAEVRAAVDLEAERAYEIVVEYRKFQPGLPLAGFRFGVVHELSDEERIARSVRAAQQADLALLFVGLSPEWESEGFDRESFDLPGAQNALVTAVADANPNTVVVLTAGSPVNLPWLERVGALLLAWYAGEEVGHAVVDVLTGVREPAGRLPFTYPQRLEDTPAFLNYPGEFGRLRYCEGLFIGYRWYDARQIEPLFPFGFGLGYTRFAYRDLVLDRESLGGEEKLTVTCTVENVGERAGSEVVQLYLAFPPGTVRRPLKELRGFRRVHLMPQGSASVSFTVSPRDLAYFDEAAREWVAPPGEYEIMIGAHARDIRLRGRFLLREELRWDAGGRFRDV

SEQ ID NO: 831 - protein, 832 aa, Coleophoma crateriformis
MGSTVDIEGLISQLTLEEKISLLAGQNFWETVPVPRLNIPSLKVSDGPNGARGAQFKGGVKAACFPASVSLAATWDQSLPQKIGNALAEETISKGAYVLLAPTVCPHRSPLGGRNFESFSEDPFLAGQLATSYIIGLQEKGVGATIKHFVANEQETRRFTMNVNVSERALREIYLKPFEIAIKKAEPWALMTSYNLVNGTHADLNEHLLQTILREQWGFKGLVMSDWGGTNSCAESITAGLDLEMPGPANRRKMEDVKKAISSGTLQVESIDGCVRAIMKLLEKTGKFAKPETPPEQAISLPAHQKLIREAGAQGIVLLKNENNILPLKKSGVKSIAALGLAKECLAHGGGSAAVSCHYKITPYEALERTLGKDVDLRFAQGAKIFRNLPDMVEGLFSLENKPGLTLSRYDTRDFSSTPEVSSHDMGTYIPLESRCEAARLEGVYRPTVTGSHYLSFSSLGPSKFLINDKVVLETTKNSDDSMGFLLGGVVEEIVSFDFVAGEEYKIRLETVAPKDEAEGGLSLLEGLLGIHLGFMLQSDYEADLLTDAVEIAKTSDIALIFVGNTPVWETEGQDMTTMSLPANGSQDALIKAVCEVNSNVIIINSTGVAISMPWLSSVSAMVQTWFPGQEAGNSIVDVLFGDVNPGGKLPISIPHRIEDTPAYGNFPGDVDTLQVTYQEGVEIGYRFYDKKPERVLFPFGFGLSYSNFEISSVTVEGKVLANGGTISVSADVKNVEGAAGHEVVQVYIAPLNSKVDRPIKTLAGFAKVALASGESKTAQVSVSYESAAFWDETLNMWKVEEGDYEILVGNSSANIVSKEKITVEETFTYGP

SEQ ID NO: 832 - protein, 855 aa, Arthrobotrys oligospora
MDATTLKEIEETLAQLTLEEKISLLAGKDFWRTVPLPEKQIPSIKVSDGPSGARGDTFSGGQKAAFFPSGILMGATFNPELAYETGALLGEEVKAKSASVLLAPTACCHRSPLGGRNFESYSEDPLLSGKMASGYIRGVQSRGIAATMKHFVANEQETWRLYVDETIDETTLREIYLKPFEIAMREGQPWAIMTAYNIINGVHCDSHPLALKQVLRGEWNYEGLVMSDWFGCNSMVESLLAGLDLEMPGPARKRPIKEFVEAAEKDESIRKAIDDSARRILTLIAKVGKWKDMTPEAPEYSRNDPETGKLIRRAGGEGTVLLKNEGKTLPLQPGSLKKVAFIGPNAKATVAGGGGSASLEPNYLTQPYETFVNAIKEINGDIEVPWVQGCIIDRWVPNIDVEGGFCRVGGPDSEAGLFLEWFRGYEATGEPVATTVFKTSNAFLWDSRPTSISPSEEFSVKFSGQISVPEDGKYNISLSTITASKLYLNGELLIDNWDFKERGNLMMNVGSEEVVKTIELKKGEWYPILVHNSSIWPKDSPRDPPMEEIGALGIRLGVAPVYDNAVLIAEAADAVKDADAVVIVVGLNNEWESESYDRSDTKLPNNQDDLIEEIAKVNQNVIVVNQSGAPVDMPWAENSNVKAIVQAWYAGQEAGHVIADVLLGKQNPSGKLPLTFPIKVQDNPSYFYFPGRDQKVEYTEKLMVGYRYYDTENVETRFPFGYGLSYSTFSIGEPSLSTAELTEGQTFTANIDVSNTSNVAGAEVVQLYVKRPASTSSIKRPVKELKGFKKVHLGTGETATANITVDDKSLGIWSTEAGKWVVEAGDYEVLIGTSSVQDELKPAGKITVKAAWSWI

SEQ ID NO: 833 - protein, 836 aa, Pyrenophora teres
MGSRVESVLQSLTLEEKISLLAGKDFWETVPIPEKGVPTIKTSDGPNGARGEVFTGGTRAACFPAAVCSAATWDPTNARQIGHALAEETKTKSARVILAPTMCNHRHPLGGRNFESFSEDPYLAGKMAANVVKGLQEKGIAATIKHFAANEQETDRLRVDEIVSERALREIYMKPFEITIKEAKPLAVMTSYNKINGTHADSNQFLLQQVLRGEWGFRGLVMSDWGGVNSTADSLNAGLDLEMPGPTRWRKVEAVMEAVKKGDVTEATITERARNVLNLIEQVGAFENPEIPPEQSIVDPKHCKLIRSVAGQGITLLKNDGVLPLRKENVKGKKIGLFGLAKEALIHGGGSASLNAHYRITPEEGLKAAYGDDVEFKFAKGAATYRLLPPLSEGCKDATGTDGWTTELFNKGNTLKPIKTANGIKEAAFSPLVEQDAKDSNVHFTTTFTPSKSGSHYLGCSGIGPTVVRIDGKVVFEQTQNSPDYMGFLFGGNPEKEFQVSFTAGKQYKVQIHSKPPAGDSDGSILSGLPGFRLGFMYEDEHNMDLVAEAVALAKECDIAIVFTGHTPVWETEGQDQVSFNLPRDGSQDKLVDKVASANPHTIVVNSTGVAVALPWINKVSALIQAWFPGQEAGNAIADVISGAVNPSGRLPISWPRRIEDAPAYGNFPGDRDEKTGQLTVRYEEGVFVGYRHYDRFDADIVHFPFGFGLSYTSFALGSASVEQRSPGSFVAKVEVKNTGAVDGAVVVQLYAGKKQKDLAKHPVKTLVAFKKVFVSRGAQGTVEMWYRDTDFAWFDEDAGMWVVDTGLYEFSFGQSAGHIDQVVTVDVKGSRALKI

SEQ ID NO: 834 - protein, 755 aa, Gordonia polyisoprenivorans
MTQQPDGAPSSIAEQARLTSGHDFWTTESVGDVPSILMTDGPHGLRKQDGPTDHLGISGSVPATCFPPAVGLAQTWSPALARRVGAAIADEARAQSVGVVLGPGVNLKRSVRGGRNFEYFSEDPHLTAELGGAWVHGLQARGVGASLKHFAVNNQETDRMRISADVDERTLHELYLRAFRTIVTRQQPWTVMCSYNRINGVHASQHRELLTEILREQWGFGGAVISDWGAVADRVAALAAGVDLTMPSPGPAADAAVAEAVANGRLAPEALTSAAVRVAALARTAAAHAPRTPETPDLDAHHALAREVAGRAIVLLRNDDDLLPLTPTADLAVIGELAAHPRYQGGGSSHVHATRVDVPLEEIRARAGAGVGFAAGYRIGAETDTDAALLEEAVSVARAASTVVLFLGLTDEQESEGFDRADIELPPAQLALAEAIVAANRRTVIVLAHGGVLRLSPLTAPALLDGALLGQAVGAAIADVLFGDVNPSGRLAETVPERLSDTPDHLSFPGEFGHVIYGEGLFIGYRWYDARELPVTFPFGHGLSYTTFEYRDLEVHTTDDGGLRVAATITNAGARTGREVVQVYLGAATSAPATGPTPVTMPTPVTAPRELKAFTDIDLDPGCSARVEMTVTADDLSRWDLRTHSFVVRSGRYAVSVGASSRDIRLTAEVDVVGDDTTGDLTLESSIAEVLADPVAAEAMTKITDALTDGADTGEGMDLVTIMGSVPVGRIVDFSAGALPREVLQDILDRANAAR

SEQ ID NO: 835 - protein, 750 aa, Stigmatella aurantiaca
MTLEEKALLLSGNGSWTTHKIDRLGLPSIMMTDGPHGLRKATGPSTADSVPATCFPTASALASSWDPELIRQVGVALARESQANDVQILLGPGINMKRSPLGGRNFEYFSEDPILAGRLAAAYIQGVQSEGVGTSLKHFAVNNQEFERMVNSSNLDERTLHEIYLPAFEISVTQAQPWSVMCAYNKINGVYASENPLLLEDILRKAWGFEGFVVSDWGAVHDRAQGVMAGLNLEMPGSGDVNRKKIIEAVNAGKLPVARLDEVVASLVAVVLKAAESRRTGTRFDVDQHHALARQVAGESIILLKNDDHILPLDAGGKKKIALIGAFAKEPRYQGAGSSQVNPARISNAHDELVAILGGSERIGYASGYDFEGVTSAELLEEARQQARHADVAIVFAGLPDSHESEGFDRPNLDMPEGHNQLIDAVSQVQPNTVVVLMNGSAISMPWVGRVKGILEGWLTGQAGGGAIADILTGKVNPSAKLQETFPVRTEDTPTAIEFPGLNQQAYYGEGVFIGYRYYDKKKIAPLFPFGFGLSYTTFDYSEMTLSASSIQDTGSLTVQVKVKNTGKVAGKEIVQLYVREEVPAVSRPEKELKAFAKVALAPGEEKTVSFTLSPRDFSYYNAHLHRWAVNPGRFDILAGGSSRDLPLSKSVSVEAQVAVSTLTRESMVKEFRDHPKGKAFYSRLTSIIMGGSSEEPGTVKRTLQEERARKKAEMSTLVFVNDMPAYKLIAFSEGKFTEQMLNDILAQVQ

SEQ ID NO: 836 - protein, 836 aa, Pestalotiopsis fici
MEGGVDTKAILDKLTIEEKISLLAGANIWESVAIPAKGVPAFKTSDGPNGARGAKFGDGLTSACFPAACCIAATFEPELALRVGRALANETKSKGARCLLGPTMCIQRHPLGGRNFESFSEDAFLTGKMAIAMVKGIQSQGVSATVKHFVANEQETCRLTVDTIVSERALREIYLRPFEMAIKEANPWAVMTSYNLVNGEHADSNALLLKQVLRGEWGWDGLVMSDWGGTNSTAAALIAGLDLEMPGPTRWRQPEVVMEALELGALSEQVINDRALHVLDFAKRLGCFEDSTIAEEKSIDRAEDRALIREAASKGIVLLKNKDNTLPLTKEKLLGKKVALLGYAKMGLAHGGGSASVNAHYRVTPWDAFQRELGDVVEFSFAKGAHTMRNLPPITENITDNQGGSGFTWRLYHPGTTEPVQVVHGHKLSEVDALDSQHIPNMEVILEATYTATETGPCYLTCSGLGPSTLAIDDRIVFEQTENCNDGMAFIFGGVPAVESVVELIAGQQYRIRIHTKPPVKIPGVDLGILEGKIGVRVGHMLASEHDKDLLTEAVKLAKATDTAIVFTGHEPSWETEGQDQLSFHLPKDGSQDRLVCAIAAANPNTIVVNSTGVPVAMPWLEDIKGLVQTWYPGQEAGNSIFDVLTGTQNPEGHLPCTFSKRLEDCPAFGNFPGEYDENRQLTVEYSEGVFVGYRHFDRLPRDKINFPFGFGLSYTEFTFSDFSVKESSKGFVATVNVTNTLSRAGGIAVQIYVGKVGNPSTDPIKTLVAFKKVTMQPNEMVRVDMPITKQSFSGFDEETRRWIVRGGDYKFGVSKSAADPVLDQIIYIEPQIFAL

SEQ ID NO: 837 - protein, 760 aa, Bifidobacterium magnum
MTDNLTIGVTEANELSVKEQASLTSGQDAWHLQGIPSKGIPGYMITDGPHGLRKTTAGNGDEMNLDRSVPATCFPPAAGLSSSWNPQLVREVGEAMGEECVQEKVAVILGPGVNIKRNPLGGRNFEYWSEDPYLAGHEAAGIVDGVQSKGVGASLKHFAVNNQETDRFRVSALVSERALREIYLPAFEYIVKHSRPWTVMCSYNKINGVYSSENHWLLTDVLRKEWGFDGIVMSDWGADHNRVAALNAGLNLEMPPSGTDEQVVQGVENGTLKREQLETMAQAMIDLAHKAEDAMNQDGYRYNVDDHNNTARRAARESMVLLKNEEHVLPVKEQDHIAVIGEFARTPRYQGSGSSRINPTRLTSFLDAAQERGVSLTFAPGYTLDQSPADTQLEQEAVDAAAQADTVLMFMGLPDYDESEGFDRTTLAMPAKQLELLGKVTAANKRVVVILSNGSAVTMTPWNESVPAILETWLLGQAGGVALADIVFGDVSPSGRLAQTIPVELTDDPSTINWPGEEHHVNYGEGVFVGYRYYDTFHKPVAYPFGFGLGYADFAIDEVQVRATGVHAAQVRAKVTNLSQDTAASHVVQVYVRPVEPKVPGEASEHVARPVHELKGFAKVYLEPGQSDTVTIDLDERAFAYWSEEFHDWRIEGGEYGIEVGSSSRDIAATVPVTIAGDGKRKPLTVWNTLDEWRKDPVGKAVAGELMAKLREQGADFTGGDTSTEIFMNTLPINSLTALMGPQGNQVEDFLLGEYARRTQ

SEQ ID NO: 838 - protein, 748 aa, Bifidobacterium stellenboschense
MSEHTYPSVKDLTLEEKASLTSGGDAWHLQGVEAKGIPGYMITDGPHGLRKSLATSTGETDLDDSVPATCFPPAAGLSSSWNPSLVRKVGEAMGEECIQEKVAVILGPGVNIKRNPLGGRCFEYWSEDPYLAGHEAVGIVEGVQSKGVGTSLKHFAVNNQETDRLRVDARVSQRALREIYLPAFEHIVKTAQPWTIMCSYNRVNGVHSAQNRWLLTDVLRDEWGFKGIVMSDWGADHDRVASVNAGLNLEMPPSGTDDEIVYAARDGRIDPAQLDRMAQGMIDLTDKARAAMSIDGYRFDVDAHDEVAHQAAVESMVLLKNEDAILPLKKDAKIAVIGEFARTPRYQGGGSSHITPTKMTSFLDTLAERGIKADFAPGFTLDLDPADSALELEAVETARDADVALLFLGLPEAAESEGFDRETLDMPAKQIELLAKVAAVNPNVAVVLSNGSVVSVAPWAGNAKGILESWLLGQAGGPALADVIFGEASPSGKLAQSIPLDINDDPSMLNWPGEEGHVDYGEGVFVGYRYYDTYDVAVDYPFGYGLSYASFEISDVHAEKTGANTASVTATVANVSDVDGAETVQVYVAPGKAEVARPSHELKGFAKVFLKAGESKTVTFDLDGRAFAYWSEKYGDWHIEAGAYGIEVGTSSRDIAATATVELEGDGKSLPLDEWSTYGEWEADPVGARVVAAVEAAGESGTLPKLPDNTMMRIFLKSMPINSMPMLMSDGGRRITAFMLDEYAKLTK

SEQ ID NO: 839 - protein, 855 aa, Bionectria ochroleuca
MGDPPSDAELRALISQLTLGEKISMLSGKNVWETFDVERLGIPSLKVTDGPNGARGGSFFDGTTAACFPSCVSLAATFNRGLASRVGAALGQEAETKGAYVVLGPTVCGHRSPLGGRNFEAFSEDPLLSGELAAEYVKGLQSQRVGATVKHFVANEQDTKRFTVNETISERALREIYLRPFEIVVKSADPWCMMTSYPKVNGRHVDAQPAFINDILRKEWGFQGLVMSDWGATSDAVSSITNGLNLEMPGPPNRRKPEIVQKAVDEGLVKVNDIDEHVFSLLNLLRRTGKFSYRREPRDEQAVVRPEHNALIREAGAEGIVLLKNSKKTLPIGTPKSKRIALLGPLTRHAAAHGGGSASLNCHYKVTPYDAFQQRLGQTCELSYSKGTHIFRVLPDLEAGAVNRNNNPGFIAEFFSNPNFSGKPFYHEEYPRGAFTTLMNTKVAGIAESVRFTTKYSPPTSGKHYLSFSGLGPSKLFIDGELVSNQVKESKDSMGFLLGVQDEHRFQYDFDSNKSYDVVIESVPSQVNNSDLFLLEGQIAAHLGFVAQAEMEADLLTEAVALAKSADIAICFVGNTAQWETEGQDMASMTLPADGSQDGLVAEVAKANTNTVVVITTGVPVEMPWLDQVSAVLQGWYAGQEIGNAIADVLLGDVNPSGKLPVSWPRKYEHTACFGHFGLDSFETQQVTYVEGVNVGYRHFDQLYETEKEVLFPFGFGLSYSTFEISNASLEGSFSQSTDGPVDITVKIQNTSSRKGAETIQIYLTAPNRGSKGRPPKSLVAFEKVSLEPSEKKDVRLSFKKDAAAYWIDSPAEAGGQVWRVESGRHEVLICTSSNPSDTHVRCALDIIEGFDFNP

SEQ ID NO: 840 - protein, 780 aa, Hungatella hathewayi
MNKKIKEILNSLTLEEKASLCSGVGLWQTRPLEDKGIPEIWMADGSNGVRIMKPVNQERKQDTSDFLKVTDLTQNSPTITNQYEAVCYPSGASLASTWDTELIEEMGEALGDECRYFKVNLLLAPGINIKRSPLGGRGYEYYSEDPYLTGKVAESFIKGVQKTGTGTSIKHFAANNAETLRINMSSDVDERALREIYLAPFEIGVKNAKPWTVMSSYNKVNGVQMAENRELLTDILRDEWGFNGVVVSDWGGVKDRIKALEAGNDLDMPENQRSNQSVVDAVRRGILSEAVLDQSVERILELVFKAKEQERFTDDMDFESHRNLSRKVAEESVVLLKNEKGLLPITKEKYKKVAVIGAFAREPRYQGGGCTLVNPIRISRPYEEMEKLAGKNIELTYAKGYELKDETSDELIHEAEEAAREADIAVIFGGLWVAYDREGFDRKHLEIDSSHIRLIEAVSRVQKRVVVVLSNGDAVVMSPWLDHVGAVVEQFLVGETVGEALARVLFGEVNPSGKLPVTFPKRLEDTSAYPYFPGECSHHVYGEGIFVGYRYFDKKKIEPLFPFGYGISYTTFQYSAIRADRSQMKDTDTVTVSVDVTNTGCVKGKEIVQIYVSDEKSRLKRPEKELKAFGKVELEPGETKTLTFTLGYRDFAYYDPEASDWVVEEGIFHIHAAANAGDIRQSIPVEVTEAKKKFRRLYLDSQHTAVFEHPMAKKMYLDFLVETGVIAADRVEAMAPLLKGNYMGIYNVVTSLLGGNVTKEEMQAVLDRINEVCKDNRPAE

SEQ ID NO: 841 - protein, 744 aa, Mycetocola reblochoni
MTTPRPSLEQKAALTSGRDTWHSESLDDIPVMMMTDGPHGLRQQLQDGGDALGIGNSVPATCFPPAAGLASSWNTGLVERVGVALGTEARATEIRILLGPGLNIKRSPLGGRNFEYFSEDPRVSGELAAAMVTGIQSMGVAATPKHFAVNNQETDRLRVSAEVDERALREIYLSAFERVVTVASPWAFMSSYNRINGVYASENHWLLTELLREEWGFDGLVMSDWGAVNDRVAALAAGLELEMPPTGTDQLIVDAVRTGELDEAVLDRAVDRLRLLAERTERPPLTGYDADAHDDLARSAAQESIVLLKNADVLPLDAAATPRIAVVGEFARTPRYQGGGSSRVVPTRMHSALDALTDALGLGADGLSFSPGFALDGDTPAGAADEAVAAVEAADVAVLFLGLPDGTESEGFDRTTIALPAEQLHLLERAAATTTPVVVVLSNGAVVDVASWEHHADAILEAWLLGQAGGLAIADVLLGTVSPSGKLAETIPLDLADTPSHLSFPGRDGVVVYGESVYVGYRHYDTRRLPVAYPFGFGLSYTRFEYSELEVTATGRNSWTVAATVTNVGERRGAETVQLYIGVEQDRPDRPVHELRGFAKVDLEPGESARVELPVTERDLSHWSVRDGAWRVEKGRYTVELAAHSRDVRLATTITSEGDGVVTRLNGMSTVGEWLDHPYGREQIQWFIDGVDTRFGATAPEMIVMLKQLPIAKLTTFGIGLDSARIERMCAEAAADGERHGEQP

SEQ ID NO: 842 - protein, 714 aa, Unknown
  Nonomuraea sp.
MNLQDKASLLSGRDFWSTKPVGDVPAAVLSDGPHGVRRQTGEADHVGIHESLPATCFPPAVAVGSSWDPAVAGRLAAAVAVEARALDVQINLGPGVNIKRSPLCGRNFEYYSEDPLLTGVLAAAHVEALQAGGVGASVKHFAANNQETGRMRVSAEIDERTLREIYLPAFERVVKHARPATVMAAYNKVNGVYASQHPWLLTRVLREEWGFDGVVVSDWGAVNDRVAALKAGLDLEMPGNPANDAMIVQAVRDGELDEAVVDRSVARVRAMVRAWRPEPAAFDADAHHALARELAAECAVLLKNDGDTLPIRADVQTIAVLGPFATEPRFQGGGSSHVTPTRVDSPLEEIRRLAGDRVVTADPDDADLAIVFAGPADLDESEGYDRAGLDLPAEQVELIRATAAAARRTVVVLSNGGVVSLEGWHDEVDAILEGWLLGQAGGGAIADLLFGVAAPSGRLAETIPMRLQDTASYLNFPGEQDVVRYGEGVMVGYRYHETAGRPVRYPFGHGLTYTTFAVSDLTVRVTGDDSARVSVTVANTGRRYGKHVVQLYVATQAGPVRRPARELRAFTKVGLEPGRSTTVTFDLDARAFAYWDVKEGRWLVAPGDYTVQIGENASAVVAEETIELAGEVIARELTLDSSVGEWFAHPQVGPVLMRHVAATMTEEQRAAAAEHQDLLRMIESLPMHQFLSPMGVRLPDQAVREMMELSRRPQ

SEQ ID NO: 843 - protein, 849 aa, Coleophoma crateriformis
MGSFLPEGSVVEALLDQLTLEEKVSLLAGANIWETVPVKRLNVPSLKVTDGPNGARGGSFFDGTSAACFPACVSLAATFNPSIAERVGQALGQESITKGAYVLLGPTVCNHRSPLGGRNFEAFSEDPVLSGILASRYVQGLQGERVGATIKHYLGNEQDTRRFSVNEIISERALREIYLKPFEMVVKDADPWCLMTSYPKINGKHVDTNKMFLQDILRDQWGYEGLIMSDWGATTSTIESINAGLDLEMPGETRWRSFPVVKKAIERGEIKPETIDERARSVLKLLERTGKFTDRKETPEEQAIDLPEHRALIRAAGSEGIVLLKNASNVLPVDIKKCKKIALLGPLAKYAAAHGGGSASLNAHYKVTPFEAFTSRVGENVEITHSKGAHIFRVYPDLEEGTKNLDGQAGFTAQYWKNEAFEGEPFHTNSFPRGSFTTLMDTAVDGKKAVRFTTIYSPPVSGNHYLSYSTMGPSKLFIDDSLQAEQKLPTKDSMNFLLGVQEEIRFQFSFEFGKCYRIQIETLAPTEPNGELYLMDGQLSAHLGFISQQEMEVDVLAEAVSLAKDADYAVVFVGNNMQWETEGQDMEDMNLPADGSQDRLISAVAKANPNTIVVNTTGVAVTLPWLDDVPVFMQAWYAGQETGNSILDVILGNINPSGKLPISWPRRYEDTAVYGNFGLDSYDSRRVEYVEDVYVGYRHFDRYYGTDREVLFPFGYGLSYTTFNLSDPKLEGKIEVGTDDGISISGTLTNLGSIAGAEVVQAYLLPPSTSTDRPVKGLVGFAKLVVESGEKRRFEISFKKDKVAFWDTSKGQWSVDGGNYTIWLSTSSSPADKQAELDFAIPEPFSFGP

SEQ ID NO: 844 - protein, 831 aa, Paenarthrobacter aurescens
MNPTLSAAVTAPSAGTQDAEAEIRDLAQSLTLEQQVQLLTGADVWSTHAIPEIGLSRVVMSDGPAGVRGEDFDERHDSVSLPSSSALSATWSVETARNYGQVLGQEARRKGVHAVLGPTINLHRSPLGGRHFECMSEDPRLTATMAAGYVAGVQSMGVGATPKHYLANEAETERFTADSVVDERPLRELYLAAFEDAITEARAWLVMSSYNSINGTTASENKLLETPLSTEWGFDGVVVSDWTGVRSIDAANAHQDLEMPGPVGHWGPKLLAAVNEGRVSREAILEKVTRILRLAARVGSLEGFEPAVTHLPTELNGAAVAREVAVRGAVLVRNKGLLPLDAKALGSVAVIGHNADEARTQGGGSATVMPKYTVSPLEGLRKALPEGVKVTYARGAKVAEGIQAFPRTSLHNPVSNVPGIRVTFLAEDGTEISGEDRLASHLIWFGIGIPDGAASIRMEADWTAETAGVHHLGVGTVGRIRFVLDGTEVFNSELEDDTEVLGAALFDPPKTVHAIDTTAGQSIRIEAEYQLPKEQVIPFTAILLGEETVVAEPQAEIDAAVEAARASDVAVVVVGTNAAIESEGFDRKDLDLPGYQNQLVKAVAAANPRTVVVVNSGSPVLMPWLDTVDAVLLGWFGGQEFGSAVADILLGVEEPGGRLPTTWPSALDDVPVLNTTPTDGKVVYSEGIHIGYRAWLKQQAEGGAAPALPFGFGLGYTTFEFGKAHAPQAVTAGKDLVVHVPVKNTGTRTGREVVQVYVERTESAVERPVRWLAGYAGAHLAPAGTESVEIRIPAKAFAHYDGGWQFEQGTFRLLVGRHAADDFQSLDIELR

SEQ ID NO: 845 - protein, 822 aa, Kitasatosporia setae
MTQLSMPSSLTTPASGTDHRVLDLERKARLVSGGDTFRTSPEPALGLFPIVCSDGPVGVRGERWDEADTALLLPCATALAASWDEELVARMGGLLAAEARRKGVHVVLAPTLNLHRSPLGGRNFECFSEDPLLTARIGAAYIGGVQALGVAATAKHYVANDSETERLTVDARVDERTLREVYLAPFEAAVRAGVWAVMSAYNRVNGTSMVEHPLLAEPLKGEWGFDGLVVSDWGSVREADGPGAAACDLSMPGPNPAWGPALAAAVRAGRVPAAALDDKVERLLRLAGRVGAFDPPPAGRAPVPADPATRGALRAAAVAGTVLLHNPDRLLPLDEPALRRVAVLGPNAATARVQGGGSASVFPAAPVSPLNGLRAALDPSVEVTHAPGVRTELRPTPLAAADCVLPDGSGPGVLVRYLAADGSPLHTEARATGRVLEPSADVDLTAVRTIEVASRFTAPSAGRWRLGVVGLGALRLEADGAVLLDEYVAPLSDDPTYLHVAPSFRQVELELAAGQGVDLLARRTVEPEHGRVLVLAADRPAAELEREFAHAVELAAAADVAVVVVGTTDEHESEGFDRAGLRLPGRQDELVEAVAAVNPRTVVVVNTGSPVLLPWRERVGAVLTCWFPGQEGGGALAEVLLGRAEPGGRLPTTWPDAEADCPVYATAPSGGRLAYAEGPHLGHRGWLRAGRTPAYWFGHGLGWGEWCYLALGEPSAPAADGSRTVRVALRNDGPRRSRETVQLYLSRPDSELDRPVRWLAGFGAVEAGPGERVEVELRLPQRALQHWSVEDRAWRTEPGTFVLHVGPHSGELPLAAALPVGA

SEQ ID NO: 846 - protein, 653 aa, Nocardiopsis alba
MGVDVVLGPGMNIKRSPLCGRNFEYVSEDPHVTARIAAALVEGIQSEGVGACVKHFAANNQETDRMRSSSDVDERTLREIYLSAFEEVVRTTAPAMVMCSYNRLNGVYTSQDPWLLTTVLREEWGFDGVVVSDWGAVVDRVEAVRAGLDLEMPPSGTDRRIVDAVVEGRLEESILDTVVERLRGLQERVSSDTSRPPEHEAHRELAREAAREALVLLRNENGALPLEPGLSIAVVGEFARTPRYQGGGSSHVVPTRVTDALAAFREALPEEAVRFAPGFTLDGTDAPGLADEAVALAEETDVAVLFLGLPESLESEGFDRTDIDLPAEQLALLARVRRVSERVVVVLANGGVVSVADWRDDADAVLEGWLPGQEGGAAVVDVLTGAVSPSGRLTETVPLRLSDHPSYLNFPGEHGHVRYGEGVFVGYRYFDTLDRPVAHPFGHGLTYTTFAYSDLEVTETGGDAWTVAFTVANTGGRAGQEVAQMYVGLPQSHPTRPVRELRGFAKTALEPGESVRVELPLTGRDLSTWDPEHGRWSLAAGTYTVSVGASSRDIRLTGEAVTSGDRFAPALTRRSTLKEWSSHPIGGPVLAEIRAGMEGLDAVPEELMRMADSLPIVALATFGEGVTEEMVDLLVADVETRRLAAIERGEITG

SEQ ID NO: 847 - protein, 759 aa, Rhodococcus jostii
MDTRSSASTALTTEEKASLTSGENFWETKALDRVGVPSIYITDGPHGVRKQTGGGDHLGIGDSVPATGFPPAVALGSTWDPDLLETVGRALGDEAKAEGVGVLLGPGINIKRSPLCGRNFEYLSEDPILSGRLGAALVDGLQGRGIGASLKHFAANNQETDRLRVSADIDARPLCEIYLRGFRHVVEHAAPWTVMCSYNRINGVYASENRWLLTDVLRGEWGFDGLVVSDWGAVSNRVAALSAGLDLEMPSTNGVTDAQIVAAVESGALAQSALDTAAERVLALVEKVRSNFDPSADYDRDAHHALARDVAGRSVVLLKNDGILPLDPAANTRIAVIGEFARTPRYQGAGSSQVVPTRLDNALDEIRTIAVGPEITFAPGYSLDESGSATGLLVDEAVSLAASADVAVVFLGLPAEDESEGFDREHIELPAAQTELLDAVLAANPRVVVVLSNGSVVRLSGRAGRVPAIVEGWLLGQAGGGAVADVLSGVVNPSGRLAETIPVRLEDTPAYLDFPGEAGHVRYGEGLFVGYRYYDSRDVAVSFPFGHGLSYTSFDYSAPTATRTAAGVEVALTVTNTGPRDGREVVQVYVGVPGSAVARPVRELKGFANVDIAAGASECVRIPIPFEDLAYFDAALSRWVVEGGDYRVWVGASSRDLRGEVVVTVEGDAPLPVLTAESTIGEWLAHPVGSEILGAALAQTAGSGVFDDPSLLRMAASMPLNRVAAFPGSPIGTEQLDALVRRAERPPRVMTDHARGGRS

SEQ ID NO: 848 - protein, 815 aa, Unknown
  uncultured microorganism
MTLEEKVSMVAGADAWHSTGVERLGIPAIKVTDGPNGARGGDFGGGVGSACFPVGVCLGSTWNTALIERVGQALGQEVQSKQAHILLAPTVNIHRSPLNGRNFECYSEDPYLTARIAAAYITGVQKQGVGACIKHFVCNDSEFERHSISSEVGERALREIYLPPSETAVREAGVWAVMSAYNKLNGTYCSENPYTLLEILKGEWGFEGIVISDWGGTYSTVEAAANGLDLEMPGPARWMGEKLLQAMRDGQVSGPKKLGEAVDDKVRRLLWTIEKAGAQLGPEPPEQAIDRPEHRALIRQAAGEGIVLLKNDGVLPLDGARVKRIAVIGPNAAEAKIMGGGSAQVKAHYAVSPLDGIRARAGEAVDVQCALGCTNYREIPELKTEWLTPVGGGESGWTVAYYNNLDLAGDPVRAETTDRTRMMWFGQVAPGVDRECFSARLSGTLTVPQSGTYTLSLNSAGVSRIAIDGELVLDNWTDYRPSRGPFDRDRKVPTAEVELTAGQGYTFVVEYSKQQSPRFAMLRVGCLPAQPADLMERAVQAAAKADVALVFIGTSGEWESEGFDRPDMELPGRQVELLEAVAAANPNTVAVLNTGSPVSVRWLDKVAALVEAWFPGQECGNAIADVLFGDVNPSGRLSQTWPVRLQDNPAYINYPGENGRVLYGEGLFVGYRYYEKKQIEPRFPFGHGLSYTTFEYGALRLQSEYTLGEPIAVSVDVTNTGPVAGQEVVQLYVRDEESSLVRPEKELKAFAKLALEPGETQTVTLTLDERALSFYDDAKAGWVAEAGEFTVLVGASSRDIRCTARFTLTVPPDRS

SEQ ID NO: 849 - protein, 748 aa, Bifidobacterium merycicum
MSDNTYPSVNDLTLEEEASLTSGGDAWHLQGVEAKGIPGYMITDGPHGLRKSLASNTGETDLNDSVPATCFPPAAGLSSSWNPELIRQVGEAMGEECIQEKVAVILGPGVNIKRNPLGGRCFEYWSEDPYLAGHEAVGIVAGVQSKGVGTSLKHFAANNQETDRLRVSANISQRALREIYFPAFEHIVKTAQPWTIMCSYNRINGVHSAQNRWLLTDVLRDEWGFEGIVMSDWGADHDRVASLNAGLNLEMPPTYTDDQIVYAARDGRIQPEQLDRMAQGMIDLVNKTRAAMSVEDYRFDVDAHNEIARRAAVESMVLLKNDDAILPVSRDAKIAVIGEFARTPRYQGGGSSHITPTKMTGFLDALAERGVPVDFAPGFTLDLEPTDPALEAEAVIAARDADVVLMFLGLPEAAESEGFDRDTLDIPAKQIELLKAVAAENKNVVVILSNGSVVSVAPWANNAKGILESWLLGQAGGAALADVIFGDVSPSGKLAQSVPMDINDDPSMINWPGEEGHVDYGEGVFVGYRYYDTYGKAVDYPFGYGLSYATFEIGGVKAVKTGANTARVSATVTNTSDVDAAETVQVYVAPGKADVARPKHELKAFRKVFLKAHESAEVSFDLDESAFAYWSEKFNDWHVEAGEYGIEVGMSSRDIAGVATVALDGDGKALPLTEWSTFGEWSADPVGSKVVADVREAGERGELPKLPDNDMMRMFLGSMPINSMSTLMGESGKAISSFMLDGYAKLVG

SEQ ID NO: 850 - protein, 752 aa, Bifidobacterium scardovii
MSESTYPSVKDLTLEEKASLTSGGDVWHLQGVESKGIPGYMITDGPHGLRKSLASSAGETDLDASVPATCFPPAAGLSSSWNPELIRKVGEAMGEECIQEKVAVILGPGVNIKRNPLGGRCFEYWSEDPYLAGHEAIGIVEGVQSKGVGTSLKHFAANNQETDRLRISANIGPRALREIYLPAFEHIVKTAQPWTVMCSYNRINGVYSAQNRWLLTDVLRGEWGFEGIVMSDWGADHDRVASLNAGLNLEMPPSYTDDEIVHAARDGRIAPAQLDAMAQGMIDLVNRTRAAMSVDDYRFDVDAHDEVAHQAAVESIVMLKNDGAILPLDADAASGQKIAVIGEFARTPRYQGGGSSHITPTRMTSFLDALDERGIAAEFAPGFTLDLEPADPALEAQAVDAAKRADTVLMFLGLPEAAESEGFDRETLDIPAKQIALLDAVAAANDQVVVVLSNGSAVSVAPWAGRAKGILESWLLGQAGGPALADVIFGRTSPSGKLAQTIPMDINDDPSMVNWPGEEGHVDYGEGVFVGYRYYDTYGKAVGYPFGYGLSYATFEISKAAVARTGANAAVVTATVTNTSGVDGAETVQVYVAPGKADVARPRHELKGFVKVFLKAGESADVAIDLDERAFAYWSERYDDWHIESGEYAVEIGTSSRDIAATVTVALEGDGKTQPLTAWSTYGEWSSDPIGAKVMAAVAAAGEAGELPKLPDNAMMNMFLMAMPINSLPTLMSEGGKSITRFMLDEYARLTK

SEQ ID NO: 851 - protein, 590 aa, Fusarium oxysporum
MVVKCANPWAIMTSYNKINGTHADSHEPLLKGILRGQWNWQGLVMSDWGGINSLADSLNAAGAKGIVLLKNTNDILPLTKEKVKGRKIAVFGYAKECLAHGGGSASVNPHYRVTPWDALCEAFADADVEFVFAKGAHTFRQLPVLTTEVIGLDGSPGFSLKIFETGASEPMSTSHGFAKSELSLLDGHALEDKVVEIVGFLSLSKPGVYRVSLAGLGPTKLLVNGRIVFHQVEPCLDAMAFLFGGSPVPEFELDLSKDMKYEIRIISAPLQSTDGKDLGFLKGQTGMRLGFMSMTEYGKDLVSEAVELASSSDYSIVFTGNDPMWETEGQDQASFNLPKQGSQDRLVEAVAAACPESTIVVNSTGVAVALPWLDQVAALLQAWFPGQEAGHSICDVLTGAQNSEGHLTCTFMKQLEDCPAYGNFPGDLDDQQKREVNYSEGVFIGYRHFDRLPRDRINFPFGFGLSYTKFDLALSNISQITEEKYLVHVRVSNMGKVEGAIAVQIYAGRKDSNPEDGPIQVLVGFKKVRIEPQECASIDIPMYCRDLAYWDEKTGYWVLDGGEYVVHVSKSAGEPIVSSVVSLRQSTYAP

SEQ ID NO: 852 - protein, 837 aa, Paraphaeosphaeria sporulosa
MSEDLNALLEKLTLDEKISLLSAKNVWETPEIDRVGIPSLKVTDGPNGARGNNFYDGTTAACFPACVSLAATFNRSLSRQVGRALGQEAITKGAYVVLGPTVCCHRSPLGGRNFEAFSEDPFLSGALASEYVIGLQEERVAATVKHFLANEQDTRRFSVNEKISERALREIYLRPFEMVAKQADPWCFMSSYPKINGKHVDAQNKFLIHILRKQWGYDGMVMSDWGAASTVEGVKYGLDMEMPGPPRQRTPEAVHEALKEGRVSEADIDARVLSTLKLLKKVGKFDDRRDTPEEQAVDRPEHRALIRKAGAEGLVLLKNDRCILPIDLKKTKKIALLGPLAKYAAAHGGGSASLNCHYKVTPYDAFIDRLPKDVQITHGKGAHIFRVYPDLEAGCINSNGNPGFVADYFMELDISDGKCFRSEEFPRGSFNTLMNTNVTGCQSVRLSTTHKPPITGDHYLSFSGLGPSKLFIDGELVAEQTGPTKDAMGFFLGVQDEIRVQYSFKTGKEYLIVAETHPSPVSNAELYLMDNQCSIHLGFILQAEMEQDVLSEAVELAKDADLAIVFVGNTTQWETEGQDLSSMNLPADGSQNHLIASVAAANPNTVVVNTTGVPVELPWFEKVPALIQAWYAGQETGNAILDVLLGEISPSGKLPISWPVKYEHTGCHGNFGLDSYESREVEYVEGTHVGYRWFDKLWGSEKEVRFPFGYGLSYTEFKVKNAQANGSFEEVVKVTAVVRNIGHTAGAETIQLYVEPPAEDGVVKKLVGFGKVDLQPGEEKDVEVQFKRQDAAYWEESLNKWMVSKGTYGVLIATSSAPKDVRARLEVVVDGDIVFEP

SEQ ID NO: 853 - protein, 752 aa, Clostridium oryzae
MKRDIKEIVSKMTLEEKAGLCSGLDFWHTKGVERLGVPSIMVTDGPHGLRKQDTSADHLGINDSVPATCFPSGATLACSWDRSLLQKVGTALGEECQAEGVSVILGPAANIKRSPLCGRNFEYFSEDPYLSTEMAANHIKGVQSQGVGTSLKHFAVNNQEHRRLSVDAEVDERTLREIYLASFEGAVKQSQPWTVMCSYNKVNGTYASENEYLLTSILKEEWGHEGFVMSDWGAVDRRENALKAGLELEMPSSNGIGDNRIVQAVKNGELKEEVLDKAVERLLNIIFKAVDNKKEGAVYDREQHHSLARKIAGECMVLLKNEDNILPLKKEGKIAVIGGFVDKYRYQGGGSSHIKPNKLDNAAEELKKAAKGENIVFAKGFSLDNDEVDSKLMEEAKNAAASAETAVIFAGLPDRYESEGYDRSHMRIPDNQIALINAIAEVQKNIVVVLSNGSPIEMPWIGNVKGILEAYLGGEAGAGAIADILFGEVNPSGKLAESFPKKLSDNPSYLNFPGEGDTVEYKEGLFVGYRYYDKKEVETLFPFGYGLSYTTFEYKNITVDKKNITDEEKLVVKVTVKNTGKLTGKEIVQLYVRDVESSVIRPVKELKGFEKVELAAGEEKTVEFVLDKRTFAYYNVDIKDWYVESGDFEILIGSSSKDIYLKDVVNVEGTTAVKKIYTRNSTVGDVMANPQARKLTEELLSSTFGQGTDDSENLGTDMTAMMKDMTLRSILHFGGDKSKEKELDKILEMLNK

SEQ ID NO: 854 - protein, 852 aa, Corynespora cassiicola
MAQESGTVHDDESLQALVGQMTLEEKIKMLSAKNVWETPEIDRLGIPSLKVTDGPNGARGGSFFDGTTAACFPSCVSLAATFNRSLSRQVGKALEQEAITKGAYVLLGPTVCCHRSPLGGRNFEAFSEDPYLSGALASEYVKGLQEERVAATVKHFLANEQDTRRFSVNEKISERALREIYLRPFEMVAKEADPWCFMSSYPKINGAHVDAQSKFLVDILRKEWGYKGLIMSDWGATSTPESVRYGLDLETPGPPRWRTTDAVTKCLADGHIEESDIDARVLATLRLLKKVGKFDDRKTTPPEQAIDRPEHRALIRKAGGEGIVLLKNNGNLLPIDTRKTKKIALLGPLAKYAAAHGGGSASLNCHYKISPYDAFVARLGGDVEITHSKGAHIFRVYPDLEASCTNARGNSGFLAEYFMSSSTTEKPFWTEEFPRGSVTTLMNTKVIGCKTLKFTTTYQPPVSGSHYLSFSGLGPSQLFINDMLVAEQKEPTKDAMGFLLGVQEEVRIQYPFSSTQSYAISMVTHPSPFSNAELYLMENQCAIHIGFIAQEEIEHDVLSEAVDLASSADLAIVFVGNTIQWETEGQDLETMTLPADGSQDNLISQVVAANPNTIVVNTTGVPVELPWVDSVPALLQAWYAGQECGNAILDVLLGEVSPSGKLPISWPKKYEHTGCYGHFGLDSFESREVEYVEGVYVGYRWFDQWWGQDKEVRFPFGFGLSYTEFDISDARISGAISGDESSQVKVSANIRNIGDRFGAETVQIYVQPPALADLGRPLKDLVGFVKVELKPGETRDITVCFQKDNVSFWNEKANQWRVCRGTYNVLIATSSDPKDAKQALRFEVEEDLDFDP

SEQ ID NO: 855 - protein, 843 aa, Choiromyces venosus
MTGQKVADYSQGSDRVRDLLSKLTLEQKVSLLAAQDFWRTQAIPEHGIPSMKVTDGPNGARGEFFTDGTPAALFPCGVSLAATWNTKLLRSVGNTLAAETKARQAQVLLAPTVCMHRSPLGGRNFESFSEDPLFAGKMSAAYINGLQEGGVGATIKHFVANEQETWRMSVNSVVEERPLREIYLKPFEIAVREANPWAVMSSYNLVNGSHADMNEFTLRKVLREEWRFEGLVMSDWGGTNSTVESIKAGVDLEMPGPSKMRAQKVMDALKKGELTENDIGECAARVLNLVERTGRFDLPVEEPQEEAIDTQETRDLIRQAGVEGITLLKNENNALPIGNEVKRIALIGPNVKQAIAGGGGSASLKPYYLTTPFDSISALSGKEIVFAQGAQTDKWTPLASNVCTTEPGKPGVILEFYKGDKFEGKPMFVQNRPKTDLFLWDNAPKEVLPEYSFRAKTVIVPETTGKHTFGLSSVGPAKMYINGKLLIDNWNWTEAGEAMFEGSIEVNESIQLEVGSKVEILIESTNEVRPAPKAGAGGPTYGYGGCRIGYIEGPDKDFIKEAAEIAASADVAVVIVGLDAEWESEGYDRQTMDLPKEGNQDRLIAAVAKASPRTIVVNQSGTPVTMPWVNDVPAIIQAWYQGQEAGNALADVLLGTANPSGKLPVTFPKRLEDNPAYHNWPGEHRRVVYGEGIYIGYRHYERARIEPEFVFGHGLSYTTFEYGPVTINDSVLTETNKLTVSVPVTNTGSRLGKETVQLYVRDVKSRLPRPDKELAAFGKIKLEPNQTKLLDLVIDKHAAGYYDVSLSSWIAEEGEFEVLIGASSADIRGKATFEVKESFTWVF

SEQ ID NO: 856 - protein, 807 aa, Saccharopolyspora erythraea
MSGAVDRPEPDESRLRSLLAGLTVEQKARLLTGSGFWTLHAMPEIGLHRMVLSDGPNGVRGTKWDERDTSLLLPVASAVAATWDVDAARLVGELFGDEARRRGVHVVLAPTVNLHRSPFGGRHFENFSEDPLLVGEIGAQVVKGIQSRGVAATPKHFVANDSETGRMTYDAVVEPRVLRQVYLEPFRRIVEQARPWAVMTAYNSVNGHSMTENSELVNGILKGEWGWDGVNVSDWLAARDCERCALGGLDLVMPGPGGPWSGGALARAVQEGRVAEELLDDKVLRLLRLAARTGALDGESEVDLSGPPDEARPVIRTLAARGFVLLRNANVDDQPVLPLSASVGKVAVIGENAVLPAVQGGGSSHVSPPHVVTPLDGIRAALSDAEVVFRRGVRHRRLLDPIPRERVHDPEGEGDGLRLDFVGDDGAVLGSELRGTETLLWLGKSDIPRGTAVLRLRGDLRAEPGEHVFGVHGSGKFEVEIAGRVVFDGEVARQVDTDDPLADMIEPPEQRVDVVLVDSDLSEDGTVAVAVDFAPDGDTVIALGLGHGGLVPDAAAEFDAAVRAAREADIAIVVVGTDAEIETEGRDRHSLDLPGAQDALVEAVAAANPRTVVVVNAGSPVLMPWVRDVPAVLWTWFGSQEYGDALADVLLGVAEPGGRLPTTLPTTTADVPVPLPRVQPMDGKLHYSEGTLIGYRAYLARDSRPAFHFGHGLGYTSWEYVDAAAVPGAVRVTVRNCGERAGREVVQVYAASHGRPPWLAGFRVVDVEAGQEAEVDVAVRIPDGSGEHRLLTGRSSGDIRLTIVVNN

SEQ ID NO: 857 - protein, 815 aa, Streptomyces venezuelae
MTETGAHTAADAARESVVEAALAKLDLDSKTRLLAGQDMWSLPALPEIGLTSLVMSDGPIGVRGVRWTADDPSVALPSPTALAAAWDPALARRAGRLLAQEARRKGVHVLLAPTVNLHRTPLGGRHFEAYSEDPLLTGAIGTGYVQGVQDGGVGTTVKHFVANDAETDRFTVDNRIAPRPLRELYLAPFEAIVKNAHPWGIMTAYNQVNGVTMTEHRHLVNEVLRGEWGFDGFNVSDWMAARSTTGDIEGGLDVAMPGPQTVYGEALAAAVRAGEVEESTVDAAVRNVLRLAARVGALEGAPPVVTDPPAAIDGDALAREIAHRGFVLVRNENGALPLKNGTVALSGAAARDARVLGGGSAQVFPEHIVSPLDGLTAALPEGALTYTIGADPSDELTPADQGFTLRAVCRDASGTVLGEGTLPNGQVQWIGDDLPAGVTHEALASIEVVGRFTPRETGEHAFGTRGLGAFRLSVDGETLFDGVQALGPETDPFEAFFGSPVERAKVVLTAGETVDVSLLHTLDKEFAAPLPAVMFSFVHLGPRRDPDELIAEAVEAARAADTAVVVVATTERVESEGFDRKDLALPGRQDDLVRAVAAANPNTVVVVNAGSPVELPWREEVAAVLLSWFPGQEGGAALADVLTGAEEPGGRLPTTWPAALADAPVTEVTPTGGELDYAEGVFIGYRAWDKAGAVPAYAFGHGLGYTTWTYESLTARPGTATVRLTNTGDRPGREVVQVYLAPVDDGVERPARWLAGFGCVEAGPGETVETEIALPRRAFEIWDEEKNDWSFVGGAYEVLAARSLTDARLSATLEV

SEQ ID NO: 858 - protein, 753 aa, Unknown
  Arthrobacter sp.
MNNYPLIEGLSLEDKASLISGFAFWNTTAIETSGIPSVVLSDGPHGVRRQEQGADHLGINAARPSTAFPTASASASSWDRDLLGTMGVALGVEARALGVDVLLGPGVNIKRSPLCGRNFEYFSEDPLLSGELGAAWVRGLKSQGVGASVKHYVANDQETDRMSISAEVDERTLREIYLKAFHRVVAKSSPATVMVAYNAVNGEPVISNHWLLTQILREEWAYDGVVVSDWGAAASDVVAAVRAGLDLDMPGTGAGSAALIDAVTSGTLDEAILDRAASRVVELATTLVGNRAHASDLDVDAHHALARKIAEQSGVLLKNEGVLPLTAETAGTIAVVGEFARTPRYQGAGSSHIVPTRLDSALDAIRERAGDRLVHFEPGFTLDGKHNVELVDRAVAAAHDATDVVVFLGLPPEDESEAFDRVTMDLPADQLALLQRIASVNDRVTVVLSNGGVVSVEPWRGSVAAILEMWLGGQAAGSAAASLLFGDANPSGKLAETIPLALADTSSFHNFPGNGQTVLYGERIYVGYRHFDSVRHDVAYPFGHGLSYTSFKYQDLRVDVIEDALEVQVTITNSGPRDGAEIVQFYSVPPKSGEDRPTHELIGFEKVTVQTGASVRVTTRIPLGDLDYWSIKSRQWVRADGVYTIQVAASSRDIRLEAGIELVGTEPARPLTLDSAMGDWFADADGAVALQEMMAQFATRGSGEWDDATRPLVLPMPLRTILPMAASKLPFPVLGERLLQRLSELRADPIGRS

SEQ ID NO: 859 - protein, 746 aa, Thermobrachium celere
MNIDEIMNELTLEEKCSLLSGADFWNLKSIERLGIRKIMMTDGPHGLRKQDMDASEIGLEKSVPATCFPSGAALASTWNKNLIKEVGKAIAKECLDNDVDVLLGPAVNIKRSPLCGRNFEYYSEDPVLSSKIAKYFIKGVQSQGVSACIKHFAANNQEFRRLTTDVRVDERAFREIYLKSFEEAIKEAKPDCVMCAYNKINGEYASDNKKLLNDILREEWGYEGVVISDWGAVNDRVKSLEAGMDIEMPSCFGVNDRIVYEAVKSGKIKIEVLDRAVKRILKLILKHSNKSQTRCVDYEYNHRLASKVAEEAVILLKNDDDILPLNKDSRIAIIGEFAKNPRFQGGGSSHVNPTKLECPIDEIKKYANSVVYARGFNSNNDEIDEALIKEAVNLAKISDVVVLFLGLPERYESEGFDRADIKLPYNQNILVDEIYKVNKNIVVSLSVGSCVEMPWLDKVKAVLNGYLLGQAGGSAIANILFGYSVPSGKLSETFIKRLEDNPSYINFPGSNDRVYYGESVFVGYRYYDYKNIDVQFPFGHGLSYTRFEYSNLKIDKNDYFDDECIDISFKLKNVGKYKAKEVVQVYISKPNSSIIRPIKELKEFEKIELDVGEEREVNLKIKVDDLSYFDEQFNSFLVEEGEYKILIGSSSRDIRLEGSIKVKNRQKVKRMYHINSTIMDVIKTEKGKELLKELVQMLDVDENNVQAKMMKEFYLNMPLRGLIYYGNGKYDFEKLNEIIDLLNNEA

SEQ ID NO: 860 - protein, 861 aa, Drechslerella stenobrocha
MFQMTLEIYEEIEATLAQLTLEEKISLLAGKDFWRTVPVPDKQVPSIKVSDGPSGARGDTFTGGVRAAFFPSGISIGASFNRELAHEVGEHLAEEIKSKSASVLLAPTACCHRSPLGGRNFESYSEDPLLSGKMAASYINGVQSKGVAATMKHFVANEQETSRLYVDETIAETPLREIYLKPFEIAMREGRPLAIMTAYNIVNGDHCDLNPYSLTKVLRGEWDFGGLVMSDWFGTNSMVESLLAGLDLEMPGPAKLRPVKELLAKAEQDEKIREAVDNSARRILTFIARVGKWKDMTPEAPEVSRNDPETAALIRRAGGEGAVLLKNEDGTLPLKPASLKKVAFIGPNSKATVAGGGGSANLNPHYLTQPYESFVTAIKEQNSDVEVVHAQGCIIDRWVPIVDSEIENGRCRTPGPDSQPGMLLEWFKGYDATGDVLSSSVEISSNLFLIDRRPAELSPREPFSVKLSGQFTVLADGEYNISLSTITAAKLYLDGDLLIDNWDFKERGDLMMNVGSEEVVATVDLKAGTFYNFTIINSSIWPKDSPPDPPMQDIAALGIRFGFAPVSDNSKLIAAAAAAVQDCDAVIVVVGLNNEWESESYDRTDTKLPNHQDDLIAAIAAANSTVIIVNQSGSAVDMPWSANPNVKSILQAWYGGQEAGNVIADVLLGKQNPSGKLPLTFPVKLSDNPTYPHFPGKDLKSEYKEGLMVGYRYYDTEGVKPQFPFGYGLSYTSFALGVPTISTRSLTERSQFSVVVDVSNTGEVAGAEVVQVYVERTTATSRTIKRPVKELKGFNKVHLQPGETKTVTVTATDTDLAVWGEVNGKWVVEAGEYKVLVGTSSVKEGLQVAGTLTAERTWLWI

SEQ ID NO: 861 - protein, 665 aa, Bifidobacterium minimum
MSASFDVNDLTLEEKASLTSGGDLWHLQEIPAKGVPGWMITDGPHGLRKAVRSDTATDQSVPATCFPPAAGLSSSWDPDLIDRVGRAMREIYLPAFEYVIKHANPWTVMCSYNKVNGVYSAQNHRLLTEILRNEWGYDGVVMSDWGACHDRVASLAAGLNLEMPPSHSDDQIVHAVREGRLPEPLLDARAQELLDLAAKVAPAMAREGYRYDPKAHQDVARAAARESMVLLKNDDAVLPLSDDDDFAVVGEFARTSRYQGGGSSHITPTEMSSFLDALRNRGVEAEFAPGFTLDDADQDAALTKEAVDVASRHATTLLFIGLPESSESEGYDRTTMCIPAKQIELLHRLAKEDSRLVVVLSNGSSVITSTWQDDADAIIEGWLLGQSGGDATADIVFGDATPSGKLAQSIPVRLEDDPSYINFPGGEGTVDYGEGVFVGYRYYDTVGREVSFPFGFGLSYTTFSIDDLRVEAQGPCDAHVDVTVTNTGTRSGSETVQVYVEPKGPSPVARPKHELRAFRKVELGPGESRVVSFDLDARAFAYWSEARHDWHVEAGDYDIEVGSSSRDIDATGTVSLDGDGNSLELTDFSTYAEWIADPVGGPILTKAQESSDSERIQGMLANPKVMAFIQDFPLTMLEAFGGPDVAKVCSTAIAEYRRTRDIQDV

SEQ ID NO: 862 - protein, 811 aa, Bifidobacterium thermacidophilum
MDATTGTNKAPAPAQARQGNGRGGNEGRNASEIRHRVDDLTLEQKASLTSGADAWHVQGIDECGIPGYMITDGPHGLRKARPAEEQKTGLGDAVPVTCFPPAAGLSSSWDPGLVREVGEAMGEECIQEKVAVILGPAVNIKRNPLGGRCFEYWSEDPFLAGHEAVGIVEGVQSKGVGTSLKHFAANNQETDRLRISATISPRALREIYLPAFEYIVKTAQPWTVMCSYNRINGVHSAQNRWLLTDVLRREWGFQGIVMSDWGADHDRVASLNAGLNLEMPPSGTDDQIVAAVRDGRIAPEQLDSMAQGMIDLVAKAQPAMSRDGYRYDRDRHYDIARRAARESMVLLKNEQGTLPVRPGVRVAVIGEFARTARYQGGGSSHITPDRMSSFLDATARRGEQVDFAPGFTLDLDPADPVLEAQAIETARHADIVLMFMGLPEAAESEGFDRTSLDIPAKQTSLLHKISAVNPHVAVILSNGSVVSVAPWCDDAQAILESWLLGEAGGDALADVVFGDVSPSGKLAQTIPLDINDDPTMLNWPGEEGHVDYGEGVFVGYRYYDTYRKPVAYPFGFGLSYATFDVHDARVRRLGVDDAARVAAERAAGDAAQGNDVARADGAAHVDGACGAVVRVDATVTNTSDAPGAQVVEIYVAPGKSQVARPVHELKGFARVDLAPGESKAVSITLDERAFAYWSQRFDDWHVEAGDYTVEVGTSSRDIVARIPAHLDGDGKTMPLDEWSTFGEWAADPVGARVVEAVGREADQGRLPRLPQNGVMRIFLMAAPVNSLQMILGEEGLEVARFMLDEYRRIRG

SEQ ID NO: 863 - protein, 852 aa, Verruconis gallopava
MTVDSLRRALNSSDEDIVKLCGLLTIDEKLSLLAAKNIWETQEISRLGIPSLKVTDGPNGARGGEFWDGTTAACFPACVSIAASFDTELSELIGQALGQEAQTKGAYVLLGPTVCCHRSPLGGRNFEAFSEDPFLSGSLAVAYVKGLQSQRVAATVKHFLGNEQDTRRFVLNEIISQRALREIYLRPFEKVVKESSPWAFMTSYPKINGYHVDATPTFIRDILRGQWHYDGLTMSDWGATSCITSIKNGLDLEMPGPPRIRTPMAIKTALASKSISASDVDSCVMNILKLLKRVGKFSDRKTTQAEVALDRPEHRALIRKAGADGSVLLKNRDGILPLSQSSIKKIALLGPLADYAAAHGGGSASLNCHYKVTPLEAFRKRLGNEVEITHGKGAHIFRVLPDLEEGTTNSNGKPGFCAEFFMTSDLSGSPFRVEEYPRGSFFTLMNTEVKGSQGVRFTSTYQPPISGLHYLSFSGLGPSKIFINNELIHEQLEDTKDSMAFLLGVQDEFNFRYNFDSSREYLIRIETSRQLEDKSELYLLDGQIAVHLGLVTQQERDADLQAEAVKLAREADYAIIFVGNTVQWETEGQDLASMKLPAEGSQDNLIAAVAAVNAKTIVVNTTGVPIETPWIDSIAALIQAWYAGQETGNAILDLLLGDVNPSGKLPVSWPKMYDHCACYGNFGLDAYDSLEVEYVEDIFVGYRHFDRMYGTEKEVRFPFGFGLSYSQFEIIDAACHGSISPDTAVSVSFTVRNISSRAGAETVQVYLAPPKSSTAGRPPKCLVGFKKVYLDPGQSRRAEISFIKDDAAYWNEDVQKWQVESGEHYIIVASSSATKDVKATIPLTVQGFIFDP

SEQ ID NO: 864 - protein, 855 aa, Unknown
  Stagonospora sp.
MPYKVNDESREGEGLNALLGALTLDEKISLLSAKNIWETPEVERVGIPSLKVTDGPNGARGGEFFDGTTAACFPACVSLAATFDRALSRQVGRALGQEAITKGAYVVLGPTVCCHRSPLGGRNFEAFSEDPVLSGALASEYVKGLQEERVAATVKHFLANEQDTRRFSVDQTISERALREIYLKPFEIVAKQADPWCFMSSYPKINGKHVDAQSKFLIDILRKEWGYEGMVMSDWGAASTVEGIKYGLDMEMPGPPRQREANLVRNAVKKGQISEGDIDARVLSTLNLLKKVGKFSDRKDTPKEQAIDRPEHRALIRKAGREGIVLLKNQNNILPIDIKKTQKVALLGPLAKYAAAHGGGSASLNCHYKITPYDAFTERLGKDVEITHSKGAHIFRVYPDLDAGCKNAHGNVGFLAEYFMEGDIEPSSVPFRIEEFPRGSFNTLMNTNVTGCKSVRFTTTYRPPVTGKHYLSFSGLGPSHLSINGVMVAEQKNSTKDAMSFFLGVQEEERVQFDFDAAKTYDLIMETHPSPTNNAELYLMEGQTSIHLGFIAQAEMEQDVLAEAVDLAKDADLAIVFVGNTTQWETEGQDLSSMTLPADGSQDNLIASVVAANPKTIVVNTTGVPVELPWLDDVPAFLQAWYAGQETGNAILDVLLGEMSPSGKLPISWPKKYEHTGCYGNFGLDSFDSRKVEYVEGVFVGYRWFDRQWGHDKEVRFPFGYGLSYTEFSITDTRISGSIANDKNARVTVAANVKNVGSMSGSEILQVYLEPPVEEGIDRPVKGLVGFVKVELQPKEEKTVEVVFARDAAAFWDEAANEWAVSMGLHHIVVATSAAPVDIKARLELHVENAFKFDP

SEQ ID NO: 865 - protein, 810 aa, Unknown
  Firmicutes bacterium
MTQYAINQEYFDKAKQIAAKMTVEQKASLCSGKDFWHTKPIEELSVLSIMMTDGPHGLRKQKDEADHLGINESYPATCFPPAATCACSFDKELMFEMGQALGEECIEQEVSVLLGPAVNIKRSPLCGRNFEYYSEDPYLTAAMAKQYINGIQSKNIGASIKHYLANSQEKLRLVSDSIVDERALREIYLPAFEASVRESQPWTVMCSYNKINGTYASENKKYLTEILRDEWGFKGAVVSDWGSVNNRNEGVEAGLDLEMPYSGPENDKSIVHAVKNRLLDINALNKCAVHMIALALASSDVKKESCDMDEHNNLARRIARESAVLLKNDDILPIKKGTKVAVIGEFAKIPRYQGAGSSLVASYKVTNVVDEFTKKGIDFEYARGYDAKSDMPDMQLITEAVKAAKRADVAIVFAGLPDAYESEGYDRTHLELPPSHTMLIESICNANKSTVAVIYTGGVVVMPWMKLVKGALLMYLTGQNNGGAVYDLIFGDYSPCGKLAESFPKALEDNPSYNWFAKKKIVEYRESIYVGYRYYDTANKPVAFPFGYGLSYAKFEYSGLSLDKSKMNQDEILTVKCKIKNTSFIEAKEVVQLYVRASSNSIFRPLRELKQFTKVTLKPLEEKTVTFELGKRAFAYWNVYISDWHVESGRYFIEISSSSRDTRLSAQIDIKGDDTVRIPDLSQKAPAYYALSKETLNIPDDQFRALLGFEIPNEPSIRPFTINSTVKDIKTSLTGRILIKLFEGYATRTAKELAKDQESVKRMIDGMIYDMPLRSLCTMTGGMFTKAKVESIVTMLNGNIIKGLIGVLKK

SEQ ID NO: 866 - protein, 870 aa, Tuber borchii
MQVRLSPDRKMALKALPKDLQEVVNRTLEGLSLEEQVSLLAGADFWRTVEIQGRVAGVKTTDGPSGARGQFFSNGTKAAFFPSGVSLAATWDKDLIHQVGEALGEEAQSKQANVLLGPTACNHRSPLGGRNFESFSEDPYLSGKLAAAYVNGVQSKGVAATMKHFVANEQETKRFTVNEIIDGRTLREIYLKPFEIAMRDAGPWAIMSSYNAINGQHADVNDFTMKQILRKEWGYDGLVMSDWGGAHDPVDSIKTGLDLEMPGPALRRGQRLLKAIKGPNNDPELLTAIKIGARHVLELVARTGKWGRFGEEPELANDKPEHRALIRKAGTEGIVLLKNENRALPISTSIKKIAWIGPNANACIAGGGGSANLNPHYLTNPLDAIRGAVKEHNIQVNYEIGCQTEKWVKSFPIAGGRVKTSPTSGEDGMILEFFGGRKCQGGIARARIMKTSTIFLMDEKPPSLADKDYSIRLTGYFTPEVSGEHILGLGAVGPTRVYLNDELFLDHTHWTEAGELFFTSGSEEVTKKLTLQAGEWYKIVTESTTKSPDQKLPDMGKDALDFASAVGIRLGIDLVRDAQEYISRAAALAKESDVAVVVVGMNDEWESEGYDRHSMDLPEKQNELISAVAKANPRTIVVNQSGCAVGMPWLAEVQGLLQVWYQGQEAGNALADVLLGKEAPGGRLPISFPKKVEDNPSWGNFGGDGGAKNEVQYSEGVFVGYRHYVSRNIPVLFPFGFGLSYTTFTLSSLGFTRGKNTLAPGATVTIEVAVKNTGKVTSSETVQVYISPRAGSLVERPAQELKGFGKVELQPGEEKVVKVVLDEFAVGYFETSVGKWRAERGVYVASVGRSVEEVVGKLGVVVEETYEWIF

SEQ ID NO: 867 - protein, 841 aa, Morchella conica
MTGQKVADYSQGNDRVRDLLSKLTLEQKVSLLAAQDFWRTQAIPEHGIPALKVTDGPNGARGEFFTDGTPAALFPCGVSLAATWNTDLLHSVGSTLALETKARQAQVLLAPTVCMHRSPLGGRNFESFSEDPYFTGKMSAAYINGLQSGGVGATIKHFVANEQETWRMSVDSVVEERPLREIYLKPFEITMREARPWAVMSSYNSVNGLHADMNEFTLRKVLRGEWKFEGLVMSDWGGTNSTVQSIKAGVDLEMPGPSKVRGKLALEALKRGELTEADIEECAARVLAWIERCGRFDLPAEEPEEKAIDTQETRDLIRQAGVEGITLLKNENNTLPIGSDVKRIALIGPNVKQAIAGGGGSASLKPYYLTTPFDSITALSGVEIVYAQGAQTDKWLPLASNVCTTPSGKPGVVLEFYKGDKFEGAPMFIQNRPKTDLFLWDNAPKEVLPEYSFRVKTVITPETSGKHTFGLSSVGPAKMYVNGELLIDNWEWTEAGEAMFEGSIEVNESTYLEAGKKVDILIESTNEVRPTPKAGEKTHGYGGCRIGYIERPDKDFIAEAAEVAASADVAVVIVGLDAEWESEGYDRQTMDLPKDGNQDRLIAAVAKANPRTVVVNQSGTPITMPWADDVPAIVQAWYQGQEAGNALADVLLGLANPSGKLPVTFPKRLEDNPAYHNWPGEHHRVVYGEGIYIGYRHYERAKIEPQFVFGHGLSYTTFDYGKPTISGTILTENNALTISVPVTNTGSRAGKESVQLYIRDPKSRLPRPDKELQAFGKVDLEPGQTKIVDLKINKYSVGYYDTSLSGWIAEEGEFEAVVGASSADIKGSVSFEVKESFTWVF

SEQ ID NO: 868 - protein, 782 aa, Dictyoglomus thermophilum
MKLEYKIPYRIERGEQTNFSPLFIRIISQGGKQMEKDIKKLISQMTLEEKASLCSGLDFWHTKPIERLGIPSIRMSDGPHGLRKEETMFSKTVPATCFPTAVTIAASWDKLLAEKMGKAIGEECQAENVQILLGPGINMKRSPLCGRNFEYYSEDPILAGELAAHFIKGVQSQGVGTSLKHFAANNQEHRRLTVDAIIDERTLREIYLTAFEKAVKEAKPWTVMCSYNKVNGTYASENEFLLTKVLREEWGFEGFVVSDWGAVNDRVKGLAAGLDLQMPYDGGNGDKKIIEAVKSGKLPEEVLDRAVERILKIVFKAIENKKENATYDKEAHHKLAREIARECFVLLKNENNILPLKKEGKIALIGAFAKKPQIQGGGSAHVNPTRVDDAVEEIKKLVGDKVEILYADGYHIEKDDVDEKLIEEAKEIAKKADVVVIFAGLPERYESEGFDRPHMKMPESHNRLIEEVAKVNSNLVVVLSNGAPIEMPWVDKPKAILETYRGGQAWGGAVADVLFGVVNPSGKLPESFPKKLSDNPSYLFFPGEDDRSEYREGIFIGYRYYDKKEMEVLFPFGYGLSYTTFEYSDLKLDKKEMKDDEVLKVSVKVKNTGKVKGKEIVQLYVRDVKSNYIRPEKELKGFEKVELEPGEEKEVVFYLDKRAFAFYNIDIKDWYVEDGEFEILIGKSSRDIVLKDKVFVKSTTKIKRHYHINSTIGDIMSDPEASAKFKHILEQFASAFPAFSSEEAIMNFAEMMKYMPLRNLIHFGQGKFTEEMLENLLKEINS

SEQ ID NO: 869 - protein, 751 aa, Microlunatus phosphovorus
MAVGLDIPRLLGELTLAEKASLVSGSGFWFTQPVERLGIPAIMVSDGPHGLRAQPPGGGDHVGLGSSLPATCFPTASAIASAWNPELLHRIGQALAQEARACNLSVILGSGINMKRSPLCGRNFEYFSEDPYLAGELAVGIVDGIQSCGVGTSVKHWAANNQETDRLRCDSQVDERTLREIYFPAFARVVEKSQPWTIMCSYNKVNGTSASENTWLLDTVLREEFGFEGLVVSDWGAVYHPVPAVQAGCDLEMPPSKGRSEAAIVAAVESGELSVDVLDARVRTVLELVAKGMHALELDESFDIDAHHALARQAAAESVVLLKNDGLLPLTVEANIAVIGEFARTPRYQGAGSSQVVPTRLDTVLEELQTVYGELPFAAAYGVGDTSNDAVLLVEAEQVAAAADIVVMLIGLPAAEESEGFDRTHLNLPDNQLTALAAVAEANPNVVVVLANGSTVVLGDVLPRASALAEAWLGGQAAGGGIVDVLTGAVNPSGRLAETIPNRLEDNSSYLNFPGEEQSVRYGEGIFIGYRGYDRQHLDVAFPFGFGLSYTSFELSDIKVRMRGSVADETLGATVEVTVTNTGDVDGSEVVQVYVQDVVSTVARPVQELKGFAKVAVPAGGAVQVSIELDQRAFSYWSPRYRRWVVEAGDFEISVGSSSRDLALSQSVTVEAATLLPPLTRDSTLQEWLADPAGRQLVEREVAAGQPGAGMQEGLLEVIGNFPMNALANLNLSLDHDSLDRVAAEWAGQQR

SEQ ID NO: 870 - protein, 745 aa, Bifidobacterium asteroides
MTEQTHTKAKDLDLQEEASLTSGSDSWHLQGLPDKGYEGYMITDGPYGLRKATGSDVYGSVPATCFPPTAGLASSWNPDLTYQVGQAMGEECIQEKVAVILGPGINIKRSPLGGRNFEFYSEDPVLAGHEAAGLVEGVQSKGVGTSLKHFAANNQETDRLRVSSDVDVRTLREIYLPAFEYVVKNAKPWTIMCAYNKVNGVFSSENRWLLTDVLRGEWGYQGMVMSDWGAVHNRVDALQAGLNLEMPPSRTDDQVVQAVQAGKLDKEQLDRMAQGILDLIDKARPAMSQQGYRYDVQEHNDMARRAAQESIVLLRNEDRILPLDPQKKVAVIGEFARTPRYQGGGSSHITPTEVSSALDGFKEAGMNVDFAPGFTLDEKEQDPALTRQALEVARGADTVVLFLGLPEYAESEGFDRTSMDLPEKQVALLKAVSEVNDRVVAVLSNGAVVTVADWMDKTKGLLETWLLGQEGGRAVVDVLTGAATPSGHLPETIPVRLEDNPTITSFPGEEGHSRYGEGVYVGYRYYDTFQRPVAFPFGFGLSYADFALDQVAVTKTGASSARVEVTVTNTSQVDGAQTVQVYVAPCASRVNRPSHELKAFTKVFLKAGQSSRVSMDLTERDFAYWSTAMDAWHVEAGTYRIQVGTSSRDLVAEEDLQVDGDGRFIPLNAESTMAEWRENSIGGPIMRDRIDQDGIPLPDDPNTAQLFDTMPLASVITLSGGDGNGIVADMVDRYHQALKQQGRDS

SEQ ID NO: 871 - protein, 856 aa, Dactylellina haptotyla
MLDESVSREIEETLAQLTLEEKISLLAGKDMWRTVPIPDKQVPSIKTSDGPSGARGDSFTGGTKAAFFPSGISMGATFNPELAYEVGQFIGDEVKSKSASVLLAPTACCHRSPLGGRNFESYSEDPLLSGKMASAYIRGVQSKNVAATMKHYAANEQETWRLHVDETIDETTLREIYLKPFEIAMREGRPWAVMSAYNIINGEHCDSNSLTLKQVLRGEWKYEGLVMSDWFGCNSMVDSLLAGLDLEMPGPAKVRPVKELVAKAEKDDSIREAVDKAARRVLTLIAKVGKWKDMTPEAPEISREDPETGKLIRRAGGEGVVLLKNDGALPLQPASLKSIAFVGPNAKATVAGGGGSANLNPNYLTQPYETFVKAIKEIDASIEVPYAQGCIIDRWIPPVNAESGLCRSGGPGSEPGWLVEWFRGHDLKGEVVSSSVFKNSDVFLWDGRPEGLNPAEGYSIRFSGQVSVPEDGNYNIALSTITAGNLYVDGELLIDNWDFKERGNLMMNIGSEEVVKTLELKKGQWYNIEVRNASIWPKDSPRDPPMEEIGALGVRLGLAAVYDNNSLIAQATDSVKNSDAVVIVVGLNNEWESESYDRTQTKLPRNQDELIEEIAKVNKNVIVVNQSGAPIDMPWVENPNVKGIIQAWYAGQEAGNVIADVLLGKQNPSGKLPLTFPVKLEDNPSYNYFPGKDKKVEYTEKLMVGYRYYDTDNVKPRFPFGYGLSYSSFKVGKPVLSTTELSEDGSFTATVEVSNTSAVAGAEVIQLYVQRKTSGTSSIKRPIKELKGFKKIHLQPGETKTAEVTVDDKSLGIWSPEAGKWVVEAGDYEVLVGTSSVYDELAAAGTVVAKSAWSWI

SEQ ID NO: 872 - protein, 842 aa, Fusarium oxysporum
MSSSAEIEEILANLTLQEKISLLAGGSPWCTFPIPSKGVPVAKLSDGPNGARGKSIYDGPTAACFPAACSIASSFDVDLAKRVATALAEETLTKGARCILSPTVCIHRHPLGGRNFETFSEDPLLTGQMAIASVQGLQSKGVSATVKHLVANEQETDRLTVNTELSQRALREIYLKPFEMVVKSANPWAIMTSYNKINGTHADSHEPLLKGILRGQWNWQGLVMSDWGGINSLADSLNAGVDLEMPGPARWRTNEAVLDAVSRGEVTEAIITERARNVLTFLNRLNCFQDPNWKEPEEKAIDRPEHRALIREAGAKGIVLLKNTNDILPLTKEKVKGRKIAVFGYAKECLAHGGGSASVNPHYRVTPWDALCEAFADADVEFVFAKGAHTFRQLPVLTTEVVGLDGSPGFSLKIFETGASEPMSTSHGFAKSELSLLDGHALEDKVVEIVGFLSLSKPGVYRVSLAGLGPTKLLVNGRIVFHQVEPCLDAMAFLFGGSPVPEFELDLSKDMKYEIRIISAPLQSTDGKDLGFLKGQTGMRLGFMSMTEYDKDLVSEAVELASSSDYSIVFTGNDPMWETEGQDQASFNLPKQGSQDRLVEAVAAACPESTIVVNSTGVAVALPWLDQVAALLQAWFPGQEAGHSICDVLTGAQNSEGHLTCTFMKQLEDCPAYGNFPGDLDDQQKREVNYSEGVFIGYRHFDRLPRDRINFPFGFGLSYTKFDLALSNISQITEEKYLVHVRVSNMGNVEGAIAVQIYAGRKDSNPEDGPIQVLVGFKKVRLEPQECASIDIPMYCRDLAYWDEKTGYWVLDGGEYVVHVSKSAGEPIVSFVVSLRQSTYAP

SEQ ID NO: 873 - protein, 752 aa, Bifidobacterium longum
MSESTYPSVKDLTLEEKASLTSGGDAWHLQGVEAKGIPGYMITDGPHGLRKSLTSSTGETDLDNSVPATCFPPAAGLSSSWNPELIHKVGEAMAEECIQEKVAVILGPGVNIKRNPLGGRCFEYWSEDPYLAGHEAIGIVAGVQSKGVGTSLKHFAANNQETDRLRVDARISQRALREIYLPAFEHIVKTAQPWTIMCSYNRINGVHSAQNHWLLTDVLRDEWGFEGIVMSDWGADHDRVASLNAGLNLEMPPSYTDDQIVYAARDGRIAPAQLDRMAQGMIDLINKARAAMSIDGYRFDVDAHDEVAHQAAIESIVLLKNDDAILPLNADPAAARKIAVIGEFARTPRYQGGGSSHITPTKMTSFLDTLAERGIKADFAPGFTLDMESADPALESEAVETAKNADVVLMFLGLPEAAESEGFDRDTLDMPAKQIALLEQVAAANKNVVVVLSNGSVITVAPWAKNAKGILESWLLGQSGGPALADVIFGQVSPSGKLAQSIPLDINDDPSMLNWPGEEGHVDYGEGVFVGYRYYDTYGKVVDYPFGYGLSYATFEIADVAAAKTGANTATVTATVTNTSDVDASETVQVYVAPGKADVARPKHELKGFTKVFLKAGESKTVTIDLDERAFAYWSEKYNDWHVESGEYAIEVGTSSRDIAETVTVALDGDGKTQPLTEWSTYGEWEADPFGAKIVAAVAAAGEAGELLKLPDNAMMRMFLNSMPINSLPTLLGEGGKKIAQFMLDEYAKLSK

SEQ ID NO: 874 - protein, 755 aa, Bifidobacterium tsurumiense
MSEQTSSSTYPSVNDLSLEEKASLTSGGDAWHLQPIEERGIPGYMITDGPHGLRKTAGDTGAIDLEHTVPATCFPPAAGMSSTWNPELVEEVGQAMAEECIQEKVAVILGPGVNIKRNPLGGRCFEYWSEDPYLAGHEAVGIVKGVQSKGVGTSLKHFAVNNQETDRLRIDARVSQRALREIYLPAFEHIVKTAQPWTVMCAYNRINGVYAAQNRWLLTDVLRKEWGFKGIVMSDWGADHDRVASLNAGLNLEMPPSFTDDQIVSAARDGRISPKQLDDMAQGMIGLVNKTRQAMSVEDYRFDAQVHDDIARRAAAESMVLLKNDEHILPLSKNARVAVIGEFARTPRYQGGGSSHITPTQLTSLLDALQQRGIEYDFAPGFTLEDGEQEQSLVDEAVNIASKADAVVMCLGLPEYAESEGFDRTSLDIPAKQLELLSKVRESNANVVVLLSNGSVVSLTPWQDQAKAVVETWLLGQSGGGAIADMLFGDVNPSGKLSQTIPLNILDDPSMLNWPGEEGHVDYGEGVFVGYRYYDTYAKEVAYPFGFGLSYSDFSIDNVSVERTGANTACVRATVTNVSQTAGAQTVQIYVAPGRSEVARPVHELKGFAKVFLEAGESKEISIDLDERAFAYWSERFNDWHIEAGTYGIEVATSSRDIVERLDIELEGDGKSLPLNEWSNMSEWRKDPVGGPIVKRMFEEGRDGRIPALPENNLGAELFLDAMPINSMSVLLGKDGKVLTQFLLDEYAKETDGLH

SEQ ID NO: 875 - protein, 839 aa, Exophiala spinifera
MGSYSGSQQGFESIISGLTVEEKATLLSGADFWTTSPVTRVGIPALKVSDGPNGARGGHFQGKTTSACFPASVSLAASFDREFAYKIGRALGQETKTKGAHVLLGPTVCHHRDPRGGRNFESFSEDPLLAGELASEWIAGLQSEGVGATVKHYAVNEQETRRFTIDARVDQRALREIYLKPFEIAVKRADPWAIMTSYNLVNGKHADEHKELITDILRGQWGFKGLVMSDWGGTNSVAPSLNAGHDLEMPGPPLKRTVDNIQRALQTGELTEDTLNQRVGNVLKLLQRAGKFENPEIAEEQAVDLPEHRSLIRQAAAESMVLLKNTNNILPLKSTNTKSIALLGLAREYLGHGGGSASVNSHHKVTAYEALQAAVGSSVQLNYAEGARIVRNLSPLSENVYNEEGVPGFTMKTFSKLNGDNPTVSTVPSSVYRTLEPSSIDQMTLLGTFKPKTSGLHYISLSTLGGTRVYINDELVFDYSNSQTTDIMAFLIGSPGEDKKRYLFTAGESYRIRIEAKATKDTISGFSLFTKEAIGFSLGFALESEHDADLLTAAIEAAKSSDVAVVFVGHTPIWESEGADRSGMDLPKDGSLDALVVAAAKVNPNTVVVNSTGSAISMPWIEDVAAVVQAWFPGQEAGHSIADVLLGKVTPSGKLPVTFPRAITDVPSYENFPGDIKNEVVHYKESIYTGYRHFDRRPEGVLFPFGFGLSYTTFDVVVTSVSRTKLRNHETLTVSADVTNTGTTEGAEVVQVYVGAGEGTSAIDRPAKELAGFAKVHLRPGEARKVAITFGRDSVAYWNESRDKWSVDKGAYTIYVGTSSVDIAGKLEVEVPEAFDFDP

SEQ ID NO: 876 - protein, 856 aa, Unknown
  Pyrenochaeta sp.
MQLSEMALTGVEVDATDVEYILKQMSLDEKIQMLAAKNVWETPEIERVGIPSLKVTDGPNGARGGSFFDGTTAACFPASVSLAATFSRELSRQIGTALGQEAITKGAYAVLGPTVCCHRSPLGGRNFEAFSEDPYLSGTLASEYVQGLQQERVAATVKHFLANEQDTRRFSINQTISERALREIYLKPFEMVVKEAKPWCFMSSYPKINGKHVDAQSLFLEDILRKEWSYDGLVMSDWGATSTVESVSYGLDLEMPGPPRFRTPEAVHQALLKGTVSESDIDARVLTTLKLLERVGKFADRRDTPKETAVDRPEHRELIRKAGSEGIVLLKNDRGILPIDVTKTKKVALLGPLAKYAAAHGGGSASLNCHYKVSPFDAFKDRLSEDVEIAHSKGAHIFRVYPDLEEGCLNARQRPGFLAEYFMTSRVTEEPFLVEQFPRGSFTTLMNTRATGCKTVRFTTTYSPVTPGAHYLSFSGLGPSKFYINDELVAHQTESTKDAMGFLLGVQEEIRTQFVFEVGKEYNIVVETHPSPTSNAELYLLDNQCSVHLGLISQEEMEQDVLAEAVSLAKDADLAIVFVGNTTQWETEGQDLESMSLPANGSQDDLIVRVAAANPNTIVVNTTGVPVELPWIDSVPAFLQAWYAGQETGNAILDVLLGTTCPSGKLPISWPKKYEHTGCFGNFGLDSFESRQVDYVEGVFVGYRWFDNLWGGEKEVRFPFGFGLSYTTFEITGTSIKGSLSNDAHHVLRVSIKVKNVGKCLGAEIVQVYLKPPVTEGLERPQKTLAGFEKIELRVGEEREVHIAIGKENAAFWDENLSKWRVSTGVYEVLVATSSHPRDCRAVLETVVEDEFIFKA

SEQ ID NO: 877 - protein, 817 aa, Unknown
  Firmicutes bacterium
MPDLQELLKELTLEEKAALCSGVTSWQTTPIRRLGIPSIFMADGPHGIRREIAGKKVDNISGSSIPSTCFPPAVTLASSWDRALLCEVGQALAEEAKEQGVSTILGPGINIKRTPLCGRNFEYFSEDPVLTAEMAIAYVNGVQNNGVGVSLKHFAANSQEYMRLSASSEIDERTLREIYLYAFEKTVKEAKPYTLMCSYNPVNGEHASQNKKLLKDILKDEWGFEGIVMSDWGAVDDRVKGIDAGLHLEMPSSNGIRDKWIADAVKEGKLSEDRLNTIVYELLEYIFKCHENTINAKGFQADYEKNHEIARKAAAEGSVLLKNDGILPLKNFSNIAVIGALADSIRTQGTGSSKLEPRKKVSFLNALDNANINYSYFAAYDPDTDETDEMSLRYAAELSKGSDLVFLFIGLTDQYESEGFDRNTLDIPFSHTELLERVTSNNKNVIVILTGGSPSIISYENKVRAILNVYLTGEAGGEAVLDLITGKINPCGKLAETFPISLSSNLASKYFAKEVAEYREGIFVGYRYYDSAKKDVKYPFGYGLSYTSYEYANLVISPYKEDPKLTYLISFDVSNTGTIAGKEIAQIYVKSKNSHIFKADKELKGFEKIYIEPGETKTVKVFLPKEAFQFFNVNSGKWEIETGEYEVMVGASSRDIRLRSDIYVDGSAMNIPDYSTITPSYYSLSNIDDIPLDEFESLLGRKVNRYIKPGKGEYTFNTCVNEFDATWFSRWFKKFTVRNSKILLPRNSTPAEKKMVVNGALAFPVRNLFAMSGGVVTYKSSLGILMMFNGHFFRGLFKLISGFFRKDIPKKEIYPLD

SEQ ID NO: 878 - protein, 671 aa, Unknown
  Cadophora sp.
MNSNVSQRALREIYLKPFEIAVKAANPWAVMTSYNLLNGTHADMSKYLIQDVLREQWGFKGLVMSDWGGTNSATESLLAGLDLEMPGPANHRKIPDIKAAIESGKLSEQTIDERVLAVLELVKKAGKFENPEEVEEQAINRPEDRALIRRAGAQGAVLLKNENGTLPLQAETVKSIAMLGLAKESLAHGGGSAAVNCHYKITPYEAFKSRLGDTVDLAYGQGVHTFRTLPILQENLLSKDGKPGFTLSRFQSKDTSAVPESVDSCPRGKWLSDGTPCIAAKLEGKFCPSVSGSHYLAFSSLGPATVIINGKKIFDVTKYDDDAMRFHLGGSVQEQVQIEFEKGKEYEIIVEAFGLPTGDEVFTLFRGLIGVQLGFMLQEEYERDILTEAVEAAKAAEVAVVFVGNTTAWETEGQDQPSMNLPVNGSQDGLISAVAAVNPNTIVVNSTGVAIAMPWLSSVKAVIQSWFPGQEAGNSIADVIFGTVNPSGRLPISIPKTIEGTPAYGNFPGDMESLQVHYREDIYIGYRFFDKHPEKVQFPFGFGLSYTDFEIRTTLQKQSVLSKENSINVHASVKNVGAVAGTHVVQVYLAPSNTNDRPDKTLAGFVKVNLTSGEEKAVTIKVTYESAAIWDESAGLWKVLMGDYKLLIGSSSQDFAGSQTFVVEETFTYQP

SEQ ID NO: 879 - protein, 859 aa, Morchella conica
MTVSPLPKDLQKKVNDVLDSLTLLEQVSLLAGKDFWRTVEIPGKVPSIKVTDGPSGARGQFFSGGTKAAFFPSGVSLAATFDPELITHIGNALGQETKTKAAQVLLAPTACNHRSPLGGRNFESFSEDPYLSGKLAASYISGVQAEGVAVTMKHFVANEQETKRFSVNEIIDERALREIYLKPFEIAVREAGPWGIMSSYNKVNAHHADLHPFSMKQVLRAEWGWDGLVMSDWGGTNSTAESLIAGLDLEMPGPTRRRGELLLKAVQDTNSSPELLAAIKTGARHVLELIARTGRWGKFQEAEEQAVDKLEHRELIRKTGAHGIVLLKNEGATLPIKREQIKSVAWIGPNANETIAGGGGSANLNPHYLTNPLESFTAAVEENDIKVAYEIGCQTEKWVRVFPVEEGRARTAPSATEGAPGLKVDFFGGRECSGECVASNVMTTSNIFLMDGKPPVLGDQDYSVRITTYIRPEATGEHVVGVGSIGPTKIYVDDKLLIDHTHWIELGELFFTSGSEEVTQKIHLEAGKWYKLVAETTSKSPEQKLPDMGNDNLDFASAIGIRLGIDAVRDVQEYIDRAATLAKKSDVAVVVVGMNNEWESEGYDRHTMALPGKQNELIEAVVKANPNTIVVNQSGCPVTMPWLDRVPAVLQAWYQGQEAGNALVDVLLGKVNPSGRLPITFPKRLEDNPSFGNFGDGGEKNQIAYTEGIYVGYRHYNSRDIPVLFPFGFGLSYTSFELGAPTVDQAAFEIGKKITVQVPVKNTGAIKGIETVQVYLAPKKSAVDRPKRELKGFAKIELEAGESGVARIELDHYAPGLFCEERKCWRALEGAYVVEVGRNVQEIDGSVEVAVEREYEWVF

SEQ ID NO: 880 - protein, 749 aa, Bifidobacterium animalis
MPHASQQNTTPAHELPLEKRAALTSGADAWHLNGLSESTSYMITDGPHGLRKAAQSTSMDIEHSMPATCFPPAAGMASSWNPGLVREVGVAIGEECVQEKVAVLLGPGVNIKRNPLGGRSFEFWSEDPYFAGHEAIGIVEGVQSTGVGTSLKHFAANNQETDRMRIDARVSERALREVYLPAFEHIVTKAHPWTVMCAYNQLNGTPCSQNSWLLTKVLRDEWGFDGVVISDWGAVHDRVEALKAGLNLEMPPTNTDEQVVVAVRDGLLDEDQLDRMAQGMLDLIEKAAPAMQQDDHPYDLVNHGAIARRAAQESMVLLKNDGGILPLAADGSVSIAVIGEFARTPRYQGGGSSKLTPTYVSSFLGSLHIRDIPVDFSPGFTLDDAKQDAALTAHAIDMAWRNDVVLFFAGLPEEAESEGFDRETIDLPQKQLRLLADIVKVNPNVVVVLSNGSAVSVTPWRDSVRGLLEGWLLGQEGGNALADVIFGDVSPSSKLVQTIPMSVLDDPSMPNWPGEAGHVDYGEGVFVGYRYYDTFGRQVAYPFGYGMTYSTFEIRNLSAIPHDNTVQVSAIVTNTGQVRASEVVQLYVAPCACDAARPAHELKGFEKITLDPGEASIVTFELDSRSFAYWSEPRNDWHVERGTYTIEIGSSSRDIAERVQVELPGDGIRLPLTLSSTFDEWSDDPIGGPILQAAINRLSQQEGHPIIPESDMLRMLLGSMPMNATNVLLGSAAGRLCERIMGLYNASNQ

SEQ ID NO: 881 - protein, 800 aa, Treponema azotonutricium
MTSKEIIPQMTLEEKAALCSGRDFWSLKGIERFGLEAIMVTDGPHGLRKQGGDGDHLGLNQSVPATCFPAACATACSFDRSLLEEIGAAMGEECRKEKVAVLLGPAANIKRSPLCGRNFEYISEDPFLTGEIAAALIKGVQKLGVGTSLKHYAVNNQEKRRMTINAVVDERAFREIYLAGFEKAVREAKPWTLMCSYNKINGTYASENKKLLTDILRDEWAYQGLVMTDWGASNNRLEGIKAGLDLQMPGPDADNDKRIIEAVKSGALSIEDLDKVVARVVDLIIKAGEGDSIGFACDMEAHHLLARRAAAESAVLLKNDENILPLVPGKTLAVIGAFAISPRYQGAGSSKINPSHLDKAFDAIMRTGIKAEYAPGYSLEAGSGVNEKLIAEAAKLAGEKDSAVVFAGLPDEYESEGFDRASMDMSESHNKLIEAVAKANPNTVVVLQLGSPVALPWADKVKGILLLYLSGQAGGGAAADLLTGNACPGGKLAETWPLALEDNPSYGNFPGSTKTVEYRESIFAGYRWYDALEKEVRYPFGFGLSYTSFEYSDLKLGTSAEAKDNFKKGDALKVSFTVKNTGSREGSETAQLYIAPDASVLFRAKKELKGFEKLHLKPGESKTVTLILDERSFAYYNVQAKDWSLEGGLYRILIGASSRDIRLEGKLELTGDKRETAFAFLKGGRPVFDDASFKAIYGAELPPKERLPGEPFTVNTSVEEIKDTPIGKALFGMAVQGLEQAFGKEKSDLKVMMESMLMDMPLRGLGMMSGGRLTPPVIEALVEALNGKPNPIASGLLGMK

SEQ ID NO: 882 - protein, 767 aa, Acidipropionibacterium acidipropionici
MAESPIQSLSMRSLSTEQKAALTSGADFWHTESCAPLGLPAIMLTDGPHGLRKQTGSTDMLGLGSSVPATCFPPAVGLGSSWDVDLIHRVGAALGAEASIEGVAVLLGPAINIKRSPLCGRNFEYISEDPLVAGTLGAAMVEGIQSRAVGACVKHFAANNQETDRMRVSADVDPRALHEIYLRAFEQVVRRAEPWMVMCSYNRINGVPASQDHWLLTDLLRGQWGFDRVVVSDWGAVSDRVASLSAGLDLEMPGTAGRTDAQILAALASGTLDEETLDSAAARVVTLLRRAAVGAGEVSGPLDVDAHHRLAREAAARSIVLLRNEVQRSETTGDEGALLPLRPDARIAVIGAFAEQPRYQGAGSSRINPTRLDTALAEIRALASGEVSYSPGFRLTPESVGPAEELRRDAAEAASQAEVAVVFLGLGDDAESEGFDRTGIDLSADQLALLDDVLAANPNTVVVLSNGAVVALPFADRVPAILEAWLGGQAGGGGVADVLFGRVNPSGRLTETIPKRLADSPAYLDFPGEHGHVRYGEGIFVGYRWYDARELEVAFPFGHGLSYTTFSYGQASAALDEDGNITVRLPVTNTGAVAGREVVQAYVSLPGSAVQRPPRELKGFVVVEAEPGQTVEAEMLIRREDLAYWDLRIDRWRVEAGTYRIDVAASSRDIRSSVEVVVPDGDAPIPLNWDSTLGELMAHPVAGPALAQAMAGALEGFAGAGDLMPAGAMAQMAGSLPLRALLTLGGDAVTPETLNQLIVLANGSPRK

SEQ ID NO: 883 - protein, 823 aa, Salinispira pacifica
MKSIQEIRSSLTLEEKASLCSGKDFWNLKSFESKGVPAIMVADGPHGLRKQMESSADHIGIGGSVPATCFPTASAMASSWDTQLLNEVGNALGEECRQEHVAVLLGPGVNIKRSPLCGRNFEYFSEDPYLGGKLAASLIRGVQSMGVGTSLKHFAANNQERRRMIIDAVVDERALRELYLAGFETAVKESSPKTVMCAYNKLNGAFCSENHRLLSEILKEEWGFEGFVVTDWGAVNDRVAGLNAGLDLEMPASGGYNDNLMVEAVQNGTLSENSLNDAVDRILKVVLETHTALQEEFTYDAAAHHRLAQKAESESAVLLKNDKLFPLNSEDFRTEEKHGSQEHKSPKLALIGSFAKEPRYQGSGSSLINPRQLDSAYDAISRELGGDMQLLYAPGYDPADEEPDSRLIQEAVNTAAAADTVIVFAGLPEISESEGFDREHLSMPRSHNDLISAVAQVNPRTAVVLSNGSPVTMPWLDSVPAVLESYLGGQAWGSAISDIIFGRANPSGKLAETFPLSLQDVPSSAQFPGGSASVVYTDSLYVGYRYFSGTGKPVLFPFGHGLSYTRFSYDGLKITGRGTGRTVQCRITNTGSRDGKEVIQLYVHSESSSVFRPEQELKGFSKVSLAPGEEKTVEFRLDDRSFAYWDPGAGDWMVESGNYEIRIAASSADIRLRETIRIDSTQTPSQWAADLRNRIPEFFSPAPELFHDISPESPFRKLLGRPIPPPHWDTREGFTRNSTLEETTRTFIGRILYKAVMREGSRMMSQDADEKSIAMMQAVIREMPLKNLGMMGGDKISMHTVDSLILLLNGKIIRGLGSLLRRK

SEQ ID NO: 884 - protein, 710 aa, Bifidobacterium mongoliense
MNETSMDDAARKATEAPRARDLSVEEQASLTSGADAWHLQGIESKGIGGYMITDGPHGLRKTAGDTGAIDLNHTVPTTCFPPAAGLSSSWNPELIRNVGEAMAEECIQEKVAVILGPGVNIKRNPLRISANVSARALREIYLPAFEHIVKTAQPWTMMCSYNRINGEHSAQNHWLLTPTCCVGSGATTHRDERLGADHDRVASLNAGLNLEMSPSFTDEQIVNGVRDGRVEPKQLETMAQGMIDLSAKTRKAMEIEGYRFDVDAHHEIARRAADESIVMLKNDANVLPADRGDSLAVIGEFARTPRYQGGGSSHITPTRMTGFLDALREDDVDARFAPGFTFDDAPQDPRLTDEALAAAKASDRMLMFLGLPNQAESEGFDRTTLDLPAKQLELLDQVTQVNDHVVVVLSNGSVVSVAPWRDKVQGILEAWLLGQAGGRALADVIFGDVSPSGKLAQSIPMRIEDDPSLVNWPGEEGHVDYGEGVFVGYRYYDTFDREVAYPFGYGLSYGSFELHDVTVRCTGDAAASVAVIVTNTSEVTAAQTVQVYVAPPKARVARPRHELKAFAKVALEPGESKRVEMALDERSFAYWSERFGDWRVEAGRYVIEVGTSSRDIADTVTVELEGDGKSMPLDEWSTFEEWRTDPVGGPIVEQMKRDADAGLLPALPEHNAGVELFLDGMPINSMTVLLGKGGKEITRYLLEQYARRIK

SEQ ID NO: 885 - protein, 751 aa, Bifidobacterium indicum
MTTDKHLQAKDLDIEKEASLTSGSDAWHLQGVPDQGYPEYMITDGPYGLRKATGSDVYGSVPATCFPPTAGLASSWNPDLTYQVGQAMGEECIQEEVAVILGPGINIKRSPLGGRNFEYYSEDPVLAGHQAAGLVDGVQSKGVGTSLKHFAANNQETDRLRVSSDIDERTLREIYLPAFEYVVKHAKPWTIMCAYNKLNGVYGSENRWLLTDVLRGEWGYQGLVMSDWGAVHDRAAALRAGLNLEMPPSASDHEVVEAVRAGNLDKDQLDRMAQGVLDLIEKAKPAMSQKGYRYDVEAHDQVARQAAQESIVMLKNEDGVLPLAPGEKVALIGEFARTPRYQGGGSSHITPTKVTTALDSFKETGMDVDFVPGFTLDEAPQDQSLTDQAVKAAADADKVVLFLGLPEDAESEGFDRTDIDLPTKQLDLLRAVSQVNDQVVVVLSNGSVVSVVDWLPQAKAVLESWLLGQAGGQAVVDILTGGANPSGRLPETIPVRLEDNPSITSFPGEEGHSRYGEGIYVGYRYYDTFNKPVAFPFGFGLSYSTFEISNVRVEKTGPNAVRVDLTVTNTSGIDGAETVQVYVAPCASKVGRPSHELKSFAKVFLKAGESQEISLDLDERDFAYWSTAMNEWHVEAGTYGIEVGTSSRDLVSKLDVDLDGDGLFVRLNSNSTMEEWREDQVGGPIMKSHVEGGKVPLPNDPNTAKLFDSMPLASVITLSGGDGNSVVADMITDYQKAIEQQGLTGASRGSE

SEQ ID NO: 886 - protein, 791 aa, Brachyspira suanatina
MNDNKYSQKIKELMKEMTLEEKVSLLSGKDFWSTKAIDRLKIDSVYLTDGPHGVRKQSTESDELSLQKSVSSTCFPTACCSACSFDPNIMYEMGEAISREAKANKVSVVLGPGVNIKRSPLCGRNFEYFSEDPYLAGKMASGWINGLEDNGIQSSLKHFAANNQETLRLIIDSVVDERALREIYLYAFEIAVKEAKPSTVMCAYNSVNGTFASENKYLLTDILRDEWGFDGIVVSDWGAVNDRVEALKAGLDLQMPSTNGEDDRKVYNAVKETIIDEKILDKAVERLLYFSLYSMDNIYDNFDYDKEEHHNIARKIAENSIVLLKNQDKILPAKKESKIAVIGEFAQKPRYQGNGSSLINAYKIDTAEEYFKENNIEFDYAKGYDSNSADIDNALIEEAVNISKDKDIVIIFAGLINSYESEGFDRKHLNLPENHNHLIEEISKVNKNVVVVLSIGAPVLMPWIDKVKGVLNLYLAGEAAVSAAFNIIFGVVNPSGKLAESFPLSLEDNPSYKYFPGGNKAVEYRESIFVGYRYYDKAQKNVLFPFGFGLSYTTFQFSNLIVSDANTIAGLDNIHVVFDIKNTGDVFGCEVAQVYISAPENNVFKPHKELKSFIKVFLEPGETKTVILKLNKRSFSFYNADTKQYEIESGVYTIYIGNSSRNLLLSKTMEINSINYYQKRIDNYFNFKEINISDNEFQQLLGRKLKPINIKASKPYHLNNNLSDLLDNNIAKEFYNKLLSGLNDMFKDDKTDTKKMFESMMLETPLRSLHTMSGGIITREDVENLINTLNK

SEQ ID NO: 887 - protein, 830 aa, Phialocephala scopiformis
MTQLTNQSSDVVIDTLLTQLTLKEKISFLVGANVWETVPIERLNIPSLRVTDGPNGARGSQFFDGTTAACFPACVSIAATFNGDLTKQIGIALGQESQTKGAYVLLGPTVCSHRSPLGGRNFEAFSEDPLLSGVLAAEYVKGLQSERVSGTIKHFLGNEQDTRRFTVNEIISERALREIYLRPFEIVIKTADPWCLMTSYPKINGKHVDTSNEFLQKILREEWKYPGLVMSDWGATTSTVESLNAGLDLEMPGKTKWRSLEQVKQALEAGTLTESTIEDRARAVLRLLKKTGKFDDRKDDIVETAVDLPEHRKLICHAGAEGIVLLKNAENILPLDKSKCKKIALLGPLAKYPAAHAGGSASLNCHYKVSPFDAFSSRLGEDTIIAYSKGAHIFRVHPDMEKECKTSTGNNGFEAEYWKNSTFEGEPFHTAEFARGSFTTLMDTAVEGKLSVRFTTTYTPTETSSPYLSFSTMGPSKMYVNDVTLFEQAEATKDSMAFLLGVQDELHSQYLFEAGKSYKIRIDNVSSPEPNGELYLLDGQIAAHLGFIPQVEMELDVLSEATELAKEADVAIVCVGNTAQWETEGQDMDDMNLPADGSQDRLIAAVAAVNPRTIVVNTIGVAVTTPWLDSVPAFLQAWYAGQESGNAIFDHTAVYGNFGMDSYESRQVEYVEGVFVGYRHFDRMWGTEKEVRWPFGFGLSYTSFEISGAKVEGSLEAPGGHGPVITADIKNVGGFAGAEVVQAYILPPKASDDHVIKSLVGFAKMTLEPSEIGRISIDVNVLQAAYWHVESRKWKIKAGTYKLWVSTSSSPDDRKAELEIVVEKAFFIDP

SEQ ID NO: 888 - protein, 802 aa, Unknown
  uncultured Microbacterium sp.
MTESVAHLRPLLDALTLEQKAALVQGADFWTTVPLPEIGLRAMTLSDGPSGVRGPRWDEREPSLNLPSGSALAASWDVDLAYRYGAAAASEARRKGVDVVLGPTINLHRSPLGGRHFECFSEDPELTAELAAAYVRGMQDNGVAATPKHYVANDSETDRFTVDVDVDDRALRELYLAPFERAVEAGAWSVMSAYNAVDGVTMTENDLLETPLNSEWGFDGVVVSDWTAVRSLDAVAAAQDLAMPGPAPAWADLLAAVRDGRVQEADLDRKVLRLLLLAERVGALEGSTALEPAPVDAEAFAREAGIEGTVLLRNTGALPLDVAAIRSIAVIGHNARDARTQGGGSATVLPERTVSPLDGLREALPEADLRYEIGAVVQEGVAEIPVAQLRNPETGEPGLRVRFLDEDGAELFSEDRRSTALVWFGGDAPVAASSRVVFETVFTPAETGEIQLGFAGANPGRLYVDDRLVLDDTPVIEGTDLGAAFLNPPSLTAGVSVEQDTPIRVRVEFTLARGGALAGALSATVGIAPEATDPEALIARAVEAAAAADVAVVVVGTNSKVESEGYDRIDLDLPGRQDDLVRAVAATGTPVVVVVNAGSPVVLPWADEVSAIVQGYFGGQEFGHALADVLTGAAEPGGRLPTTWPATLADVPVQDVTPQDGVLTYGEGIHVGYRAWLKDAATPAFPFGHGLGYTTWSWGAAHRHGDAVDVTVRNTGDRAGKQVVQVYAERGDSSVDRPVRWLVGFATVHAEPGETVTATVPVPGRRLAHWADGWVVEPGAYTLRAGASVDDLPLALEWTVAE

SEQ ID NO: 889 - protein, 840 aa, Periconia macrospinosa
MADLLQKLTLEEKIRLLSAENIWETLAIERVGIPSLKVTDGPNGARGGSFFDGTTAACFPACVSLAATFNRSLSYQVGKAIGEEAITKGAYLLLGPTVCCHRSPLGGRNFEAFSEDPYLSGALASEYVKGLQRENRVAAAVKHFLANEQDTRRFSVNEKISDRALREIYLKPFEIVAKEADPWSFMSSYPKINGKHVDAQSKFLIDILRNEWNYEGLVMSDWGATSCAESVRYGLDWEMPGPPRQRTLENVQTALKAGEIKESDIDTRVLATLNLLKKVGKFDDRRVTPEEKAIDRLDHRSLIRKAGSEGLVLLKNEGSILPIDTKKTKKIALLGPLAKYAAAHGGGSASLNCHYKVTPYDAVAERLGNDVEITHSKGAHIFRVYPDVEAGCSNSRGNPGFLAEYFMDLEPSTSPFRSEEFPRGSFTTLMNTHVTGCKTVRFSTIYRPPVSGNHYISFSGLGPSKLFINDTLVAEQREPIKDAMGFFLGVQDEVRIQYDFDSSKEYSIVAETHPSPYSNAELYLMENQCSIHLGLIEQAEMEQDVLSEAVDLAGKADIAIVFVGNTTQWETEGQDLSSMTLPADGSQDKLVASVVAANPNTIVVNTTGVPVELPWLESVPALIQAWYAGQETGNAILDVLLGEVCPSGKLPISWPKKYEHTGCYGNFGLDSFESRSVEYVEGVFVGYRWFDKMWGGEKEVRFPFGYGLSYTQFELSSAKLAGSISEDANAGVNVTLKLKNIGTVAGAETVQVYVEPPVVRGTDRPVKTLVGFAKVELQPGEEQEVDVEFKRDGAAFWDEKQSRWKISKGIHAVLVATSSDPKDVKARLEIAVEGDFLFSP

SEQ ID NO: 890 - protein, 832 aa, Arthrobacter ulcerisalmonis
MNLPLSPAVTAPAAGSPDAEALIHNLADSLSLAEQVQLLTGADVWSTHTLPSIGLSRIVLSDGPAGVRGEDFDERHDSVSLPSSSALSASWSAELAHRYGQVLGQEARRKGVHAVLGPTINLHRSPLGGRHFECMSEDPRLTATMAAGYVAGVQSMGVGATPKHYLANESETDRFTVDSVVAERPLRELYLAAFEDAITESRAWLVMSSYNSINGTTASENDLLETPLSTEWGFDGVVVSDWTGVRSVEAANAHQDLEMPGPVGHWSAKLLAAVESGQVSREAIVEKVVRILRLAARVGSLDGVSPAVAELPAALDSAAVAREVAIRGAVLIRNSAGLLPLDASALTSVALSGHNADEARTQGGGSATVMPKQNISPLMGLREALPATTSLSYTRGAKVAEGLQQFARTALHNPVSNVPGARVTFLDASGTEIFAEDRLASSLIWFGVGIPEGTAAITISTDWTAEQAGVHHLGLGTVGQARLSFNGTEVFNGELLDTTNVLGAALFDPPSTVHQIETTAGETVRIEAHYTLPPEQFIPLTAILLGEEAVVTDPQAEIDDAVAAASSADVAIVVVGTNSSIESEGFDRSNLDLPGHQNELVRAVAAANPRTIVVVNSGSPVLMPWLEDVGAVLLGWFGGQEFGRAIADILLGVAEPGGRLPTSWPAALADVPVLSTTPVEGKLEYAEGIHVGYRAWLQQQAAGGPAPAVPFGFGLGYTSFEFSAPHAPQQVQAGNDVIVHVPVRNTGSRAGREVVQVYLERPDSTVERPVRWLAGFAGTHLAPAGTESVEVRIPARAFEHYDGGWQVERGAFRILVGKHVEDDFQVLAIDVR

SEQ ID NO: 891 - protein, 832 aa, Pseudarthrobacter chlorophenolicus
MNPTLPAAATVPAVGSPDAEARIRDLAESLTLEQQVQLLTGADVWSTHALPAIGLSRVVMSDGPAGVRGEDFDERHDSVSLPSSSALSATWSVDLARRYGQVLGQEARRKGVHAVLGPTINLHRSPLGGRHFECMSEDPRLTATIAAGYVAGVQSMGVGATPKHYLANEAETDRFTSDSVVDERPLRELYLAAFEDAVTEARAWLVMSSYNSINGTTASENDLLETPLSTEWGFDGVVVSDWTGVRSVDAANAHQDLEMPGPVGHWGPKLLAAVGDGRVSRTAILDKVVRILRLAARVGSLDGVSPAVTELPAPLNAPAVAREVAVRGAVLVRNKDGLLPLDPAALGSVAVSGHNAEEARTQGGGSATVMPKQNISPLEGLREALPANVAISYHRGAKVAEGLQAFPRTSLHNPVSNVPGLRVTFLAADGTELSGEDRLASHLIWFGIGIPEGAAAIRMETDWTAPSAGTHHLGLGTVGRIRLSLRGQEVFNGDIEDETEVLGAALFDPPKTVHAIETEAGERVRIEALFELPADQAIPFTAILLGEETVVADPQAEIDAAVEAARTADVAVVVVGTSAAIESEGFDRKDLDLPGHQNRLVEAVAAANPRTVVVVNSGSPVLMPWLDKVGAVLLGWFGGQEFGRAIADILLGAEEPGGRLPTTWPAALEDVPVLDTTPMDGKVVYSEGIHVGYRAWLKQQAAGGAAPALPFGYGLGYTTFELCTPHASQAVPAGKDVVVHVPVRNTGTRAGREVVQVYLERPESAVERPVRWLAGYAGTHLAAGGTSSVEVRIPGRAFAHYDGGWQVEPGTFRILVGRHSADGFQALDIDVR

SEQ ID NO: 892 - protein, 816 aa, Haloplasma contractile
MGISEIISKMTLEEKASLCSGKDFWRLKEIERLDIPSIMVADGPHGLRKQAGESDHVGINNSLPATCFPTAVTTASSWNTELMNEIGKALGEACLQEGVSVILGPGMNIKRSPLCGRNFEYLSEDPYVTGKMASALINGVQSKGIGTSIKHYAVNTQEKRRMTIDSVVDERALREIYLAGFETAVRESQPWTVMSAYNLVNGTYASEHKTLLTDILRDEWKFEGIVVTDWGACNDRVEGLKTGLDLEMPSSKGVNDQKIIEAVKEGTLSEAVLDRTVERILNLVFKSQENKQAYTYDEKSQHDLAKKAAIESIVLMKNENSILPISHTSSIAVVGDFAKQPRYQGAGSSLIKPTKLDTIYDEFKQRELTFNYSKGYERNNDDPNEALIKEACENAMETDVVLLFIGLTESYESEGFDRDHLRVPESHRVLLERLSEVNENIIVILSGGSPVEMPWLKHAKGLVNSYLAGQAGAPAIAKILFGEVNPSGKLAETYPIQLEDHPSYHYFAKGPLTTEHRESVYVGYRYFDTANKEVLFPFGYGLSYTTFEYSDLTVSEESITDSEPVKVKVTVKNTGQMTGAEVVQLYVSDVESTIYRPVQELKGFKKVYLEPGEDQVVEFELTKRAFAYYNENMNDWHVESGEFTILIGSSSRDIRQRATIYVKSSQPDVNVPDYRETAPTYYKLTDSEFTIEDSEYQAVYGKELPASSYQKGDKFTMTSPLEDVRATFFGRIVYNAAVKELKKMTGGADSNQAHENLQVRMLEAVVKEMPFRSLVTMSNGAVSPAKAKALLKLINCQYIRGLIGLMKVSFKNRKKK

SEQ ID NO: 893 - protein, 840 aa, Cochliobolus heterostrophus
MNSQSNIDRLLQSLTLDEKVSLLAGGSIFGTAGIPEKGVPSIKLIDGPNGVRGASADGSTAAACFPAACSIAATFDIDLARKIGHALAEEALSKNAHCILGPTMCIHRHPLGGRNFESFSEDPFLSGKLASQTIQGIQSLEVGATVKHFVANEQETARLTVNEIISERALREIYLRPFEIAIKEAQPWAVMTAYNQINGTHCDSNRWLLNDVLRGEWKWEGLVMSDWGGTNSVSASIKAGLDLEMPGPPRIRKADRVLEALRKRDINEGDINERARAILTFIEKAKVSERSAIPLGLAIDKPEHRALIREAGARGIVLLKNERSLLPISKEKLKGKKIAMIGFAKDALAHGGGSAAVNAHYKITPWNALQTTLSHGVQMTYAKGVHRERLLKPIEKDGDCGKIMGLDGQPGFTRLYFEEDSPAPTSVLHGFERSAYSPLGSQESIWKHIEIVGHFTPRETGTHYIACSGVGPTKVLIDGNAVFEQDTICSDPMGAFFGAAQEQEIKVFMSAEKSYYIQVISSPPRNVGVGILEGRTGVRMGFALESEHDADLIGDAVRIAKEADLAIVFTGHDPQWETEGLDQESFHLPCKGSQDALVSAVARANQDTIVVNSTGVAVAMPWINDVAAVLQAWFPGQECGNAIVDVLTGKINPEGHLPVSFPRKLEDAPAHGNFPGEYIDNRLHVKYAEGIFVGYRHFDRMAPDSINFPFGHGLSYTTFDFPEMAVKNQTENAFDVLVDVKNTGAVAGATILQIYVGRSKTAQEHPIKSLVAFSRVYLHPGETKTVQLSVSIREIAYFSEDLQQWIIDGGDYDVSLGRSAVDIAQVRVLYIMQTSYARSS

SEQ ID NO: 894 - protein, 742 aa, Unknown
  Microbacterium sp.
MSDSVAQPSVTDLTLEEKASLTSGADFWTTTAIDRAGVPSIMMTDGPHGLRKQADGNDHVGLANSVPATCFPPAVGLSATFDPELAVRVGEALGVESAIENVAVILGPGINIKRSPLCGRNFEYMSEDPIVSGVMGGALVRGIQSRGVGASLKHFAANNQETDRLRVSSDVDPRPLREIYLRGFQIAIEGAQPWTVMCSYNRINGAYASEDPWLLTSVLRDEWGFEGLVVSDWGAVNDRVAGVIAGLDLEMPSSGGATDAQLVAAVRDGSLDEAALDVVARRVLDLVQKAGRRPAIDGHLDIDAHHALAREVAGRAIVLLKNDDRVLPLAAEQKVAVIGAFAETPRFQGAGSSLINPTRLDSALDGFAEYAAEGAVTYAAGFALDGSGDADVLRAEAVAAASASEVAVVFLGIPASAESEGFDREHIDLPADQLALLDAVLVANPRTVVVLSNGGVVALPFADRVPAIIEGWLLGQAGGSATADVLYGAVNPSGRLAETIPVRLEDNPSYGNFPGEHGHVRYGEGLFVGYRWYDERGLDVTFPFGHGLSYTTFAYGDAQASVRSDGDMAVRIAVTNTGERAGRELVQVYTALQGSAVQRAPRELKAFQSVALEAGETREVELIVRRDDLAYWDVRVDRWVVEGGEYEVHVGASSRDIRSVASAEVAGDELVLPASLNSSITELLAHPVLGERMRALVAAAFGPGAESEGALQVLGSFPIGRLAAFPNVPATRDEIERMIAQA

SEQ ID NO: 895 - DNA, 2286 bp, Artificial Sequence
  6xHis UPI000503B26C
atgcatcatcatcaccatcacgagaatttatacttccagggttcgatgtccgaaccgacccacgtaaacagttcggacctgtcgctggaagaggaggcgtctctgacgtctggcagtgatagctggcacgtgcagggacttcctgaccgtggcctggaaggttacatgattacagacggaccatacggcctgcgcaaagccaaagatagttcatctactgatgtgtacggttcggtgccggcgacttgttttccgccgacggcgggtctggcgagctcctggaacccagaactgacctataaagtgggtcaggcaatgggcgaagaatgtgttcaggaaaaagtagcggtcattcttgggccgggcgtgaacattaaacgtagccctctgggtgggcgggacttcgaatattggtctgaagacccggtgctgacaggtcaccaagctgccgagctggttgaaggtgtgcagtcccagggcatcgggaccagtgttaagcattttgcggccaataatcaggaaaccgaacgtcttcgtgcgagctctgatatggatgaacgcaccttgcgcgaaatctacctgcctgctttcgagtatattgtcaagaaggccaaaccgtggaccttaatgtgtgcgtataacaggctgaacggtgtgttcggcagcgaagatgggcgtcttatgactgatatcctgcgtggagagtggggcttcgatggaattgtgatgtcagattggggtgcagtgcataaccgcgccgccgcactcaacgcaggcttaaacctggagatgcctccgagtgactctgacgaccaagtggtggcagcggttaaggcgggagagctgtcgaaagaacagcttgacaagatggcccagggtatgatcgatctgattgaaaaagctaaacctgcgatgtctcgcgacggctatcgttatgatgtgcaggcgcataaccaggttgcacgtcaggcggcatgtgagagtgtggtcatgctgaaaaatgaagacggcattctgccgctgcgctcaaacgaaaaaattgccgtgattggcgaatttgcgcgcactccgcgctaccaaggtggcggcagcagccatatttctccgacgatggtcaccacagcactcgaagcgtttgaaaatagtagcatggaggtttcgttcgcgccgggttttacgttagatgaggaaccgcaggacgaagcgcttaccaatgaagcgttacaagctgcgtcaaaggcggataaagtcgttctgtttctcggtctgccagaagaggcggaatcagaaggttttgatcgtaccagcctggatatgcccgccaaacaagtgggtttattaggtaaagtctcggccgtcaaccccaacgtggtcgttgttctgtctaacggctcggtcgtgtcgttaaccgattggcttccacaggccaagggagtgttggaagcgtggcttctgggccaagctggtggccaggccgttgtagatctgttaaccgggcgcgccaatccgagcggcaaattagcgcaaaccatcccgctgcgtctgaacgatgatccaactgtgctgaactttccgggggaagagggtcatgtgaattacggcgaaggcgtattcgtaggttatcgttactatgacaccctcgataagccggttttattcccgtttggtttcggcctttcctactccgacttcgaggttagtggcgtccaggtcgaaaaaacgggagctaatgcggcgcgtgtgcatgcaaccgtgaccaatactagccaggtggacggagcagaaaccttacaggtctatgtcgcccctggcaaagcgaaagtaaaccgaccggcgcacgagttgaaagccttttccaaagtatttctgaaagccggtgaaagcaaggcggtgtcaatggacctcgacgagcgtgattttgcatactggagccgtatcatgaaagattggcacattgaggcgggagattacgggattgaattggctacctcttcacgcgacatcgtgcagacggtgaccattcatatcgatggagacggcaaaacatttcgcctgaacgaagaaagctcgatgcaggaatgggaagaagatccaatcggctctcctattctgagcgccaaactaaaagagctggaggctgatggtgttcatctgcctgatgacccgaacacgatggtactgtttcgtacgatgcctatgggcaccgtggtaacctttagcggtgccaacgggcgccaggttattaaagatctcatggccagttacaaggcggctctggcgaaatga

SEQ ID NO: 896 - DNA, 2388 bp, Artificial Sequence
  6xHis UPI000502B461
atgcaccaccaccatcaccatgaaaacctgtacttccagggatcgatgcgtggtgtgtgggcacgccggccgcagcgcaaagcctcgcaggtaaatggcaacgacgttgtccaccatcccgatccgcatggcaatgaaggtttcatgggtgaacatcatcatcatgcggccgacctgaccttggaagaacaggcgtctttaacgagcggcggagatagctggcacctacaagcggtggaaagtaaggggataccgggctacatgattaccgacggtcctcacggcttgcgtaaaacagccggcagctcagagacagtggatcttgacaacaccgttcctgcaacctgctttccgccagcggcgggactttcaagctcgtggaacccgaagctagtccacgaagtaggtgaagcgatggccgaggaatgtatccaggagaaagtggcagtgatattaggccccggggtgaatattaaacgtaatccgctgggtggccgctgcttcgaatattggtctgaagatccgtatctggcaggtcacgaagccgttggtatcgttaccggtgttcaatcgaaaggcatcggcacgtcactcaaacattttgcggttaacaaccaagaatcggaccggttacgtataagcgccaacgtaagctcccgcgcactgcgtgaaatttattttccggccttcgagtacatcgttactacggcacagccttggaccattatgtgctcgtacaaccgcatcaatggcgttttttcatcggaaaatcactggttgctgtcggatgttctgcgctcgcagtggggttttaaaggcattgtcatgagtgattggggcgcagaccacgaccgtgttgcaagcttgaacgcaggtctgaatctggagatgccgccgtcgcatacggacgatcaaattgttgatgccgttcgccagcagaaagtggacccgaaacaattagaagatatggcccagggtatgctggacctgacggataaggcctctgccgcgatggatatcgaaggctatcgtttcgatgtgcaggcgcacgatgatatggcgcgccgtgctgcacgcgagtcgattgtgttgctgaaaaacgatgacggcattttaccgctgagtaccgatacgaagttggccgtcattggtgaatttgcgaggaccccgcgttatcagggttccggttcatctcatatcaccccaacccgtatgacaagctttttagacgccctgagcgacgcgggcattgaggccgcattcgccccgggtttcaccctggatgactcagaacaggatgcagcccttcgcgatgaagcacttcgcacggcacaagatgcacagacagttgtcgtgttcttgggcctgccgagcgaagccgaatctgagggctttgaccgcaccacgctggacattccgcgaaaacagaccgaactgttgaccgcgctcgcggctgtgaataaggagatcattgtcgttttaagcaatggctccgtggtgtcagtcgaaccgtggcgcgagcaggcaaaaggtattgtagaatcttggctgctaggccaagccggtggagccgccttagttgatgtgcttttcggaagcagcagtccatcgggcaaattagcgcagtcaatcccgctggacttgtcggatgatccctcgacggtaaactggccaggtgaagaaggccatgtagattatggcgagggtgtattcgtagggtatcgctattatgatacctacgataaaccgctggcttatccttttggcttcggtttaagctacgctgactttgatatcacagatattcgtgtagacaaaacgggcgctaatacagcagaagttcacgctacggtatcgaacacctcgtcaactccaggtgcggaaaccgtgcagatctacgttgcgccgggtaaagcggatgtcgcccgccccgtgcatgagctgaaggggttcgaaaaggtttatttagaagccggcgagagccgagagatcacgatccctctagacgaacgtgctttcagctattggagcgagcgctttgacgattggagaatcgaaaaaggcagctatggcatcgaggtaggtacgtcaagccgggatatcataggccgtcgtgatgtagaaattgatggcgatggtcgtcgcatgccgctggatgagtggtcgaacttagaggaatggcgccaagacccaatcggcgcacagatagtgaggcgtatgatagaggaaggcgaaaacggccgcctgccggtgattccgcaagataacacagccgtgatggtctttctggacaccatgccgattaactcgctgtcaatgctgatcggtccgggaggcgaccgtctgaccacttaccttttagaacagtaccgtcaggccaaggcctga

SEQ ID NO: 897 - DNA, 2580 bp, Artificial Sequence
  6xHis UPI00052B8681
atgcaccatcaccatcaccatgaaaatctttactttcagggcagcatggtgcaggaaaaagacattagtaccgccgatgccgttctggcgagccttaccctggaagaaaaggtgagcctgcttgccgggggtagcttttggtctactgcggcaataccgggcaaaagtatcccatcagtgaagttttccgatggcccgaacggcgcccgcggctccgaaatgaaaggtggcccaacctctgcatgtttcccatgcgcggtgagcttggccgctacgtggaatttagatgcgatcaaggaagtgggaaaagccctggccgaagaaactaaaaccaagggggccaatcttctgttaggtcctacggtttgcccgcatcgtcacccgttaggcggccgaaactttgagagtttctcagaagatccgtttctgagtggaatgatggcgagcgaatatattgtagggctgcagggtcagggtatcggagcagctattaaacattttgccgccaatgaacaggagacttttcgcaatattcttgatgttaccgtaagcatgcgcgcgctgcgcgagatttacctgaaaccgttcgaaattgcaatcaaacaggccaaaccttgggcgctgatgaccgcctataatagtgtcaatggatcacacgccgattgtaactcgactctcttgcagcagattttgcgcgaggaatggaaatgggatggcctggtcttatcggattggggtggtacaaacagcctggtggaatcgcttacagcgggtttagatctggaaatgcccggtccgccgacggtgcgcaaaagcgaattaatcatgcaggcactggaaagtaatgcgatccccgaatccatcatcaacgaccgagcgcgtgccgtgttgcgctttgttgcgaccaccaccggctttggcccgcagaaggaatgcaaggaatacgccgatgaccgtccgtcacatcgggaactgatacggcaggtaggccgcgaagggattgtgctcttaaaaaatgaagatgatattctgccactgaaacataccgccagtgcgggttcattaaccaaaatcgcattattaggatttgccgatgaagcgcttatacatggggggggctcagcagcagtaaatgcgcatcatcgcataacccttgcggaaggactccgtgacgcatttaaagatcgcggcttggagatcgaatgtgcaaaaggcgcacacacgctccgtaaattgcctctcatggttgatcatgtgaagaatgatgaggggaaaccgggatggtcgatgcagtttctgcatccgaaagacccggcaggtgtttggcgtcacattggtgaaccgtcctatactccaaccgccccgggcaacgagggtatgacggtacgcgcgacaacccagttttgcgtgcctgcgtcaggccgccactatttaagcctcagcggtttaggtccgtcttcacttaaaatcaacggcgacgaagtttaccgacaagacggcaactgcccagatttgatggcgttcatcctgaccagctatgcggacataccggtccaatacgattttgtggcgggtcaaacctaccacattgaagtgttaagcaaccctttggaagcgtacaacggccctagcttcatgaatggtcgtgctggcttcagtgttggctttatgctcgaagcagagcgtgatgccgatttgctggcggaagccgtgactctggcaagccgtagtgacattgctattattcttacgggaaacaccgcggaatgggaagctgagggccaagatcaggtgggttttcatctaccacgcgatggcagccaggatcgtctggtttcggccgttgccgccgcgaacaaaagcactatcgtcgttaattgtaccggcggtcctatcgccatgccttggatacacgaggtgaaagccctcctccaggcttggttcccgggtcaggaagcaggtcattccattgcagatatcttagttggtgaccgttttccgagtggtcgcttgcccgttaccttcccccgcgcgattgaagataccccggcctatcgcaacttcccggggggcttcgaggaggatggccgggctcgtgtgcgttatgaagaaggcgtgtttgtagggtaccgcttctatgaccacaccccggaacagcgcgaaaaggtcttgttcccgtttggctacggcctgagctataccagctttacgctgcatgacattagcctcgcgactcttaaggaccatcacgaaaaccatattgaggtgcgtgttagcgtgtcgaacgttggcaaacgccgcggcacggagacaatccaggtatatgtaggacgcgcggaccatagcgaacaacatccgtggaagaccttagtggccttcgcacaagttagtctggatgccggggagacccgtgagatgagtttagaactgtcacgccgcgatttggctttttacgatgaatcgactgaacattgggtagttgaggccagtgattacttggtgcacgtcggaaccagcgtattcgaaatcgcttcaaccgaacgtctgcatattccagaaagaattgattacgccttgtga

SEQ ID NO: 898 - DNA, 2478 bp, Artificial Sequence
  6xHis UPI0005ED0AE6
atgcatcatcatcatcaccacgaaaacctctatttccaggggagcatgaccgagaccgcaaccagcacccacactgattcggtccaacatttggtgccgctgttagatcgtctgaccttggagcaaaaagcagcgttggtgcagggtgcggatttttggacaaccgtgcccctgccggaaattggcttacgtgcgatgaccttaagcgatggtcctgcaggagtccgcggaccccgttgggacgagcgcgaaccctctttgaatctccctagtgggtctgcgttagcggcaagttgggatgtggatctggcttatcgttacggagcggccgcagccagcgaagcccgtcgtaagggagtggacgtagttctcggaccgaccatcaacttacaccgcagtcccttaggcggtcgtcattttgaatgctttagcgaggatccggaattaaccgcagaactggcggcagcatatgtgcgtggccttcaagacaatgatgtcgcggcatgtccgaagcattacgtagctaatgattcggagaccgatcgtttcacggtcgacgtgcgtgttgacgaacgagcgctgcgtgaaaattatctggcaccgtttgaacgcgcggtagatgcgggggcttggacgattatgtcagcctacaacgcggtcgatggagtgaccatgactgaaaacgatcttctggaaactccgctgaacagcgagtggggctttgatggtgtggtaattagcgattggacagccgtgcgcagcctggactctgtcccagcagcgcaagacttggccatgccgggaccggctccggcttgggccgatttagtggctgccatccgtgacgggcgtcttaatgaagctgatctggatcgaaaagttctccgtgtcctgctgctggcgcaacgtgtgggcgcgttaggtgaacgtgagccgcgtgaaccggcgcctctggatggacctgctttcgcgcgagaagccgcaattgagggtaccgtgttattacgcaacgaaggcgtgttgcctctagatgcaagctccttgggtcgtgtggcagtgattggtcaaaacgcacgggaagcacgcacgcagggcggcggctcagccacagtaatcccggaatcggttgtgagtccgttggacgcaattcgggctgcagtaccaggcgccgatgtcggttttgaaattggtgctgttgtgcaggaaggcgtagcggaaatcccactggcgcaccttacaaaccctgccactggtgaagcgggcatccgtgttgcgttctttgatgctgatggtactgagttgttcgcagaaaaccgccgctcgactgcactggtctggtttggcggtgatgcccccattgccgcatcagctaccgtggtatttgagacactgtacaccccggcggaaaccggcgatatcgaactgggctttgcgggtgccaatccgggtaaactgtatgtagatggccagttggtgttggatgatagcccggttatagagggaaccgatctgggcgcagccttcctgaatcccccgtcaattacggcaactgttgccgtggaggccggtcgtgagactgcggtgcgcgtcgagttcagcagagagtcacacggcgccctgagtggcgctttgtcggcgacattaggaattgcgcctgaacgcaccgatgcagatgaactgattgctcgcgcggtggccgaggcagctgcaagtgatctcgcaatagttgtggtgggcacgaatagcaaagtcgaaagcgaaggctatgatcgtaccagcttagatctcccgggccgccaagacgatttggttcgcgccgtagctgcgacgggtacaccgactgtagtggttgtcaatgcaggtagccctgttgttctgccgtgggcagaagatgtagcagctgtcgtgcaggggtattttggtggacaggaatttggccacgcgattgccgatgtgctgaccggcgcggccgaacctggcggccgattaccgacaacatggcctgcggctcttgcagacgttccggtgaccgaagttgtacctacggatggtcgcttagaataccgtgagggcctgcatataggctatcgtgcatggctcaaagccgatgctgtaccggcgttcgcctttgggcacggcttgggttataccacgtggagctggggcgccgcacaacgtactggcgacacagtggaagttacgttagccaatactgggcatcgccgcgggaaacaagttgtccaggtgtacgcagagcgccctgaaagcgccgtggaacggcctgaacgctggcttgtaggtttcgcgaccgttcatgctgcgcctggagaaaccgtgaccgccaccattcctgtgcctgcccgccgtctggcgcattgggcaggcgaatggactgtggaaagcggcgcatacaccctacgtgctggtgcgagcgtggcagacttaccactgagcctggaatggcggatcgctagctga

SEQ ID NO: 899 - DNA, 2307 bp, Artificial Sequence
  6xHis UPI0008206F38
atgcatcaccatcaccatcatgaaaacctttacttccaaggctctatgttggacatcgaaaaacttatcgatgaaatgactctggaagaaaaagcaggcttgtgtagcggggatgatatgtggcatacgaaagccgtggaacggctgggtattccccgtattaaaatgagtgatggcccacatggtatgcgtaccttcgacgataatggcaaagttattccggcggtctgcttccctacaggctctgcgctggcagcgtcattcgatacggagctggttgaacgcgttggcgccgccattggcgaggcggctaaaacgaatggcgtgcatactgtgttgggcccagcagtcaacatgaaacgttcaccgctctgtggtcgcaacttcgaatacttatccgaagatccgtacttggcaggcaaactgggcagtgccatggtgcgcggtattcagtcgaaaggtgtcggcgcgtgcccgaaacattttgcggtcaacaatcaggaaacccgccgcatgtccgtttcggcagatctttcggaacgaacgttgcgtgaggtgtacctgccggcgtttgaaaccattgtgaaagaaagcagtcctcacactatgatgtgcgcctataaccgcatcaacggtacttacgcgtcggaaaacgaacatctgctggacgaaatcctgcgcaaagaatggggataccaaggtatcgtcatgactgattggagcgcgatgaatcgacgcccacgagcactgcaggccggtttggaattagaaatgcctagcagtgcgggcgtgaacgatgaaaagatcgtggaagccgtgaaagcgggagatctgagtattgaagtgctcgatgaggctgtgcgccgtctgttgacatggattaatgcggaactccagggtcgtacggaaagcgtatgtgatctaggtgtgcaaagggaactggcccgtgaagcggctggtaaatcggcagttctcctgaaaaacgacgacgtcctgcccctgcgtaaaggtgataaaattgcctttattggggggttcgcagacaaaccacgcttcgaaggcggtggtagctctcatgtatcagtggagcacatggtgaatgcaatagacgcggccaaggatattccaaatattacctataccgaggggtttaataccgatgacgcgctgtcggattacgagttagttgcagaagcggtgcgcattgccagcgaggcagatgtagcggtgatttttgcgggtttaccggccgcctttgaaagcgaaggccatgatcgcactacgcttgaaatcccggagtcgcagaataaactgattgcggcgattagcgcggtgcagccgaaaaccgttgtagtatttcatggcggcagcccggtatacatgccgtggcgtaaagacgtggcagccatattatatatgtatctgggcggccaggaagttggaagcgcatcggtggatctgctgttcggggatcgcaatcctagcggcaagttagcagagacatttccgctgaaattggaggatacgccctgctatatgaacttcccgggagacggaaataatgctgaatattcggaaggcatctatatcggctaccgctggtacgataaacgaaaaattgcggttgagtacccattcggcttcggcatgagctactctgacttcatctatcgtcagatacgtagcgccaatagtcgtatcaccgataccgatactctaaagatatacgttgatgtgcaaaaccggggtgagtacgcgggcgaagaaatcgtccagttatatgttcaaccctcaaaagcccgtcagggcgtgcgcccggtgaaagagctcaagggctttaagaagatgatgattgcgccaggcgaaaccaagaccgtgtgctttgaactggataaacgttcctttgcggaatataaaccggaaatttcagggtggtacgctgcaaccggcgaatatacaattctggccggcggtagcagcgataacctgccgctgcaggtgaaagtttacgtagaaagcaccgatacaatcccgctggtgtataacgactataccacgattggtgacctgtgggatagcggcctcgacgttaatgaagttctggacgcgctagatgcgaaacagactgatctgtcggcgttaggcctgcccgcggacaaaatggatcgcgcaatccacatggaagaggttaaacgcggtatgcccattcatgccgttatttcaatgggtggtcgtgatatgaataaaatctatcaggcgttactcaaagttgacggcttagaaggcaaggaaaatatcccactctga

SEQ ID NO: 900 - DNA, 2535 bp, Artificial Sequence
  6xHis UPI000BC57319
atgcaccatcatcatcatcatgaaaacctgtattttcagggcagcatggtgagcaactctattgatattgagggcattctgagccaacttacccttgaagagaaagtgtcactcaccgccggtaaagacttctggcatactgtagcaattccacgtgtgggtattccgacccttaaggtgagcgatggcccgaacggcgcacggggcggtaaatttttcgacggaactcccgcggcctgcttccctaatggcgtatgtctcgcagcaagctttaacaccgatctcgtagaacaggtggggaaagcactgggtcaggatataaaaagcaaaaacgctcatgtactgctgggtccaactttgaatatccacaggtctgtcctggggggccgtagtttcgaggcatactctgaggatccgctcctgtctggcaagatgacagcggcgtacgtgcgcggtctgcaaagtgaaaaagttgcagcgactcctaaacactatgtctgcaacgaacaggaatttgaacgcctgtctattagttcggaagtaaccgaccgtgccctgcgtgagatttacttaagcccttttgaaattgctatccgcgaaagcgacccgtgggctctcatgacgtcgtacaaccgcgtgaacggtacatacgcaagtgagcatccgaatacactgaagaaaattttacgagaggagtggggatttgatggcctggtaatgagcgactggaccggcgtctacagcaccgcggatgccataaataatactctggatctggaaatgccgggtccgtctcgttggcgtgcggataaattgctgaaagcggtgaaagatggtcaggtcagcgaggaaactattacggagagcgtgcgtcgtctcctgcaactgtttgtcaaagtgggccgttttgaagacccgaccgatccgttaaccacgccggaacagggcattaataaacctgaacatgcggcattaattcgccgtgcggccggcgagggaattgttcttctgaaaaatgaaaatgacgcactcccgattagcaccgatagcgtcaagagcattgctgtatttggcccgagcgcagtaaaaccgattgcgatgggtggcgggagcgcccatgtacgcgcacactacgttatcaccccgttggaaggtatacaaaaagcggcaggtcctaaggtgaaagtgacttacatgcaaggagcgacgaccaataaaaacgtgcctcttttcgaacagaccgttgaaacaccgaccggcaaaatcggtacgcagatcgaatactttaaactgaactccttccatgaagcgccctttaaagttgatgtgttcccttcggcgcgttggattaatattgaaaagcccgagggtattgagtccaatattatgagtgtgcgtgcaacagcagtgtacaccgctccggtttcggggatctatatcattggcgtttgtattcaaggccagggtcgattactgctgaacggcaaagaattaattacaggcaacattacgtttaaaccgggagagatgctgggcgaacataaatatgaactgcgtcgcgaagtgtctctggaagcgaataagaaatataccgtggcggtagagctgtccgtacagaaagaagaagagtgggcaggtttccaatttggcattcaggaacccctggatcacgacgcaatcgcaaaagcagcggcgctggccgcggaatcggatatcgccattgttttcaccggactgaccgatgaatgggaaagtgaaggcttcgatcgcgaaaatatggacttttccggcaatcaggttgagctggtcgaggctgtggcgaaattcaacaagcgtacgatagtcgtgaataacacgggctctcctgtgaccttgccgtttctgcctcggattcaagccttactgcaggcttggtatccggggcaggaatgcggcaacagcatcgccgacatcctttttggcaagacgaacccgtcgggtaaattgccgacaaccttcccgcaccgcctggaggacactcccgcttttctgaactttccgggcgaaaatggtaaagtgttgtacggtgaaggtatctttgtgggcatgcggtattacgaaaaactgaatttagatgtagcgttcccctttggttttggcttgtcatacacgacattcgagctgggtaacgttagcatttctagcacgaaagttagcagcgagaaggacttgccgattacagtgtcggttcacgttaaaaacaccggcgcgatggatggagccgaagccgtccaggtatacgtccgtgatgtagttagctcccttgtccgccctatcaaagaactgaaagcatttgcgaagatccaagtgcaggcgggccagacccaaaaagtggaaatttccttagacaaacatgcgtttggctactgggacgacaagaagtatacgtggatcgcggaggctggcgattttgaagtgttggttggcacctcatcacagcatattcatggcaaagcagccgtcaccctcacgaacaacatcgaatggttattctga

SEQ ID NO: 901 - DNA, 2358 bp, Artificial Sequence
  6xHis UPI000B3B73CD
atgcaccaccaccaccatcacgaaaacctctacttccagggatcgatgaagaccgttactgagagcgacatgattttaacccagctaacgctggaagagaaggcctccctgtgtgccggcctgaacatgtggatgactaagtctgttgaccgcctcaatattcccgcgattgcgatgtatgatggcaccaacggcattcgtaagacagcaagcatggaagagctcggcatatttggcgataatgttccggccacttgctatccgacaggttccgcgatcggtagtagctggaatgttgaactgctccgggaattgggcgtcgcactgggaaaagaaggacgtgaactggacgtggaaattctgctgggtcctggaatcaacatgaagcgcacacccctgggcggccgtaactttgagtactattccgaagatccctgtttgaccggcgagctaggcgcagcgttcgtggatggcctccagtcacagggtgtcgcggcaagcgtaaagcatttcgcctgcaacaaccaagagtatgaaaaaatgatcacgagcagcgaagttgatgaaagaactttgcgcgagatctacttaagcgcatttgaacgtatcgtaaaaaaagcaaacccgtggaccattatgtgcagctacaacctgctcaatggcgaatacacatccgaaaacgaattcctgctgaagaaaatcctgcgtgaagaatggggttacgatggagtagtcctgtctgactggactgcagttgacaatcgtgttaagggcattaaagccggtctggatcttgagatgccaggtccggcccattataacactaaagccattgtcgaggccgttcagtcaggcgaactggaggaacgacagctggatacgtgcgtccgtcgcatactggaattagtgcgccgcactcgtgaacatcgtggagtcgagcttcctagcgcggaagaacgccacaaattggcacgtcgtgccgcggcggagagcatggttctgcttaaaaacgataagggtctgcttccgctgcagccagagcgcctaagttctgtggcggtcatcgggcgttttgccaaacaaccgcgcatccagggtgccggttccgccaaagtgacaccgactcaagttgacattccgtgggatgagatgcaggatattgcaggtgagcgactggaactacgttatgcagagggctacgcacaggattcaccgcctgatactatcgacgaatgcctgattgaagaaagcgtcgccttagcgcgccgcagtgacgtagcaattattttcgcgggtcagccggaatcgtcggaatcagaaggactggacattgcgtctattgacctgccgtgtcaccagagtaaactgattcaggccgtggcagatgcccagcctaattgcattgttgtgctcagcagcggcaccgcattagtaatgcgcccgtggattgatcaggtcagctgcgtgatacaagggtggttatctggacagggcggtggccgagccatcgcagaaattctatttggccttgtgaatccgtccggtaagctttctgaaacgtttcccgtcaaactgagcgacacgccttcgtatttgtatcctcgtggggaaaatggcaaattgttctaccgagaagggctgtttaccggttatcgctattatgaccgcaagcagctggagccgcaatttccgtttggtcatgggttgagctatacaacattcgagtacgtgagcctggaagcggtccaaaccggggatgaagtgcatgtaacatgcgccattcgcaacaccggtacgcggagtggcaaagaaatcattcagctgtacgttaatgatgaggaatgcctgtggcagcgccctgataaagaattgaaagcctttgctaaagtgaacttggaaccgggtgaaactaaaatggttcatttcacccttgatcgtcgcgatttcagttattacaacaccaaacagcagcgttgggttgccgatatgggctttttcaatatcttagctggtagttcaagccgcgatattcgtctccgctgccgtctccactgcgattttggcacccaacaggcagttcagtttcacactttcagcctgttaagcgattggcttcgctatagccactcacgtgccgtcctcgaagaatatctggcggacatgaaccgtcatgcagaagaagccgtgattctaaacgaggaatttatcggtttctggaatgactttccactcattaaaattatccaaatgttcggtcagcagtggttacaggatacttccccgcacctggtaatagaagagatgctggaacgcgtggcacgctgtcaaccggcagatgaagagctgccggagcgttga

SEQ ID NO: 902 - DNA, 2478 bp, Artificial Sequence
  6xHis UPI000F8FB9BA
atgcatcatcaccaccatcacgaaaatctgtatttccaggggtctatgaccaccgagtcaaccgtagcgacctcagatgccacgagtcatttactgccgcttctcgcgcagttaacgctggcgcagaaggcggcctttgttcagggcgcggatttctgggcgactgtacctcttccggaaatcggcgtccgttcaatgacgttgtcagacggtccggcaggtgtacgtggacctcgctgggatgaacgagaaccgagcctgaacctgccttcgggctcggcactggcggcctcgtgggacattgatctggcttatcggtatggcgcggccgcagcatccgaagcccgtcgtaaaggtgtcgatgtggttctgggtccgaccatcaatctgcaccgttccccgttaggcggacgtcacttcgaatgcttctccgaagacccggaactgacggctgaactaggcgcggcatatgttcgcggcctacaggataacggtgttgctgcgaccccgaagcattatgttgcaaacgattccgagaccgatcgtttcaccgttgatgtccgtgtagacgaacgggctctgcgtgaactctatttggcgccttttgaaagagcggtggaagccggtacttggagcgtcatgagtgcgtataactccgtagacggtgtgacgatgactgaaaatgacctcctggaaactccgcttaactcggaatggggtttcgacggtgtcgttgtatcagattggaccgcggtacgcagcttagatgccgtcgccgcgtcgcaggatttggcaatgcctggacctgccccagcttgggcagatcttgtggccgcggtagaagacggccgtgtgtcggaagcagacctggatcgaaaagtgcttcgtatgcttctactggctgaacgcgtgggagcgctggagggagcaccgggtattgaaccagcacctgttgacggcgtggcttttactcgcgaagcagctgttgagggtacagtgctgctgacaaacgatggtactctgcctctggacgcagccgcacttcgaagcgtagccgtcattggtcataacgcgctggaagcgcgcacccagggtggcgggtctgccaccgtgctgccggaacatgtagtcagcccattagaaggtctgcgtacagcattgccggatgccgccgtgagctacgaaattggtgctgtggtccaggaaggggtcgcggaactaccgttagagcagcttcaaaacacggttacgggtgaaccggggttgcgcgtgagcttctttgacgcggatggccttgagttgtttaccgaggatcgtcgctcaacggcgctggtctggtttgggggcgatgcgcctattgcggcgagcagttccgtagttctagaaacggtgtataccccggccgaaaccggagaaatccaattgggctttgctggtgcaaatccgggacgtgtcagcattgatggcgtcgaggttcttgcggaaacccccctgatcgaaggcacagacctcggtgccgcgtttctgaatccgccttcaagcaccgcggcggtcagagcagaagccggacgccctttacgccttcgtgccgaatttgccctttccagcggtggcccgctggccggtgcactaagcgttacactgggtatcgcgccagaaactaccgaccctgatgaacttatcgcacgcgctgcagcagcagccgcctccgcagatgtggcggtggtagtggtaggaaccaatagcaaagtggaatcggaaggctatgatcgcgtggatctggatctaccgggccgtcaagatgacctggttcgggccgtggcggcgacaggtaccccaactatcgtggtagtcaatgcgggctcccctgtggttttgccgtgggcgggcgaagtggccgcagtggtgcagggctacttcggtgggcaggagtttggctcagcggttgcagcagtattgaccggcgcagcagaacctggaggacgcttacctaccacctggccagcagctttagccgatgtccccgtgaccgacgttgcgccacaggatggcgtactcgcgtatacagagggcattcatatcggctaccgcgcgtggcttcgtgcggacgcggcccctgcatttccgtttggccatggtctgggctacacaacttggtcctggggtgcggttcagagggatggcgatgcccttgatgttaccttagcgaacacaggagcacgggcaggtaaacaggtagttcaagtgtatgcagaacgagcagatagtacagtggaacgccctgtgcggtggttagttggatttgcgaccgtacgagctgaagcaggccagaccgtgaccgcaaccattcctctaccagcgcgccgctttgcacattggagcgatggctggcaggtagaggggggtgcattcacgctgcgtgcgggtgcgagcgtggctgacttgcccctgacgatggaatggagcattggtgactga

SEQ ID NO: 903 - DNA, 2301 bp, Artificial Sequence
  6xHis UPI00019923DC
atgcatcaccaccaccatcacgagaacttgtattttcagggcagtatggaattaactgctgctaccggacgtaacgatgtgacagagaattatgttgatggcctcagcctggaagaaaaagcatctcttacctcaggctcagatttttggcactcacagtccgtcgcgggaattgagagcattttactcacggatggtccacacggggttcgcaaacaaccggaaggcggcgatgccttggggctggggcatagcatacctgcaacgtgttttccccctgcagtgggcctgggctcttcttggaacttagatcttattcgccaagtaggtgaggccctgggcgatgaagcaaaggccgaacaggttagcgtactgctcggtcccggaatcaatattaagcgcagcccgctgtgcggtcgaaattttgagtacgtgtccgaagacccgtttctatcaggccgcgtggccgcagccttaataaccggaatacaatctcggggcgtgggaacaagcttgaaacatttcgcggccaacaatcaggaacatgataggatgcgcgtgagcgccgatgtcgatgaacgtacgctgcgtgaaatttatctcgccggttttgaatatgcggtgaagaccgcggcgccgacgacagtaatgtgtagctataacaaaattaacggcgtatatagctcgcaaaatcattggctcctgaccgaggtgttacgcgaacagtggggattcgatggactggtggtgtcagactggggtgccgtcaacgatcgcgttgccgcattagcggccggtctggatctggaaatgcctcctaccggcacggatacgcagattgttgatgcggtacgcggtggcgacctggatgaaagcgttctgaccacagctgcggaacgcttgtcgactctggtgaaacgcacagccgccgcacgcacggaaggccatacctatgacgttgaacgtcatcatgaattagcacgcaccgcagcagctgaaagtgctgtacttctggcaaacgatggtgaacttttgccattaaccccgggtgggcagaccgttgcggtaatcggcgaatttgcatgtagcccgcgctaccaaggcgcgggcagctctcaggtagtaccgaccaaactggataacgcgctcgatgcaattttggatttagagggtgcggaccgcgttacgtttgccccgggtttcacatttgatgggacgccggacgatcatatggtgactgaagcggtggatgccgcgcgtcgcgctgacgtggctgttttattcttaggtttaccgagcgccactgagagtgaaggttttgatcgcactgatatcgaactaccggccgatcaaattgctcttctggaagccgtacacggtgcgaatccgaacacggtagtcgtacttgcgaacggtggagtagtatctattgagccttggaaagatcatgcggcagcgattcttgaagggtggttactgggtcaagcggggggctcagcgattgccgacttattatttgggattaccaaccccagtggtcgtctcaccgagaccattccacttagactgcaggataacccgtcatatctgcacttccccggatcacagcaacatgtacgttatggagaaggcctgtacgttggctaccgctactatgacagcgccttgcgtgaagtcgcatatccgttcgggttcggcttatcctacactacctttgatattaccgataccagcgtggacgccggtaaaaattccgctgaagtcactgttacagttcgcaatagcggtgatcgttccggctccactgtagtccaggtgtatgtgcacgatgccagtgcatcaatcgatcgcccggcccaagaattaaagggctttgctaaggtgcacttggacccggatgaatccgctacggtaacgattaccctcgatacccgtgctttcgcgtattggagcgtggcggcccaggattgggccattgaaccgggtgactacgaaattcgtgtgggcttttcgtcgcgcgatattgccacgaccgacacgattacgcttgctggtaatgtgggtgtgggcacgttagatgcgatgtccacaattggcgagtggttagctcatccggttggatctgccgtgcttggtgctgcgatggcagcagccgcgggcgatggtgcccaagccgtgtcaccggaaatgatggcgctggctggcagcatgccgctgggcaaacttgcgacatttggtctgggtattaccgaagaacaggtagctcagttagtggcagcggccgcgcaacctggctcatga

SEQ ID NO: 904 - DNA, 2283 bp, Artificial Sequence
  6xHis UPI00022C19B5
atgcaccatcaccatcatcatgaaaacctgtactttcagggttccatgaccccggcggaaatcaccgacctgattagccagctaaccctggaagaaaaagcgtcattgtgctcaggtggtgattcttggcatttgcaaacggtggaaaaactcggtattcccggcccgatggtaaccgatggcccgcacggccttcgcaaggtcgcggatggttctatggccggtatttacgattcagtgccggcaacgtgctttcctactgcagctggtcttgcgtcgacttgggacccagaattagtacacgacattggcgttgctttaggtgaggagacccgcgctgaatcagtctccgtactgttaggtccaggcatcaatatgaaacgttcgccactctgcggtcgaaactttgaatactttagcgaggaccctgtcctggcaggcacattagcgacggagctggtgcgtggcattcagtcacaaggcgtcggcacttcgctcaaacactttgcggcaaacaatcaggagaccgataggctgcgcgtcaatgcagagatcgatgaacgcaccttgcgcgaaatctacctgcctgcctttgaaatggttgtgaagcaggcggacccgtggaccgtaatgtgcagctataacgcgatcaacggggtttatagcagccagaatcgttggcttctgactgagctcttacacgaagaatgggggtacaaaggtttagtgatctcagattggggcgccgtggtcaatcgggtagaaggactccgggctggcctagatctggaaatgccgggagatgccccacgcaacgatgcccgcattgtagaagcagtgcgcagcggcgacctcgatgaggagattctggacactgccgttgcgcgtattctgtccctcattgcacgtgcgagcgcggcgatggcagatccggggagttacgatattgaagcgcaccaccagttggcgcgacgtgcggcggccgcatctgttgttctgctgaaaaacgatggagatgttctgccattgattgatccggatgacgttgtggtcattggtgagtttgcccgcactcctcgttatcaaggtgccggtagcagtaaagtcaacccaactcgtgttgatacggcactggattctcttcgtcagacctgggacgatgtaccttttgcccctggttttactttaacggatcacccggaccctcagttagcggatgaagccgtgagtctgtcacgcggcaagactgcagtgctgtttttgggactgcccgcggttgcagaatctgaagggtacgaccgcactaataccgatctgcccacggatcagattgacctgttagcgcgggtgcgtaaagttgcctcacataccattgtggttctgtcgaatggttcgtcagtgggcaccgcagaatgggatgatcaagcggacgccattgttgaatgttggctgggcggccaagcgagtggttcgggtgtgattgatgttctgaccggcaaagtgaaccctagcggtcatcttgccgagacgattactcgcaaactttcagatattccggcccagctgaacttcccgggtgaatttcaacatgtgacctatggcgaaggtcgatatattggctatcgcggtttagacgctacggaacgcgaagtggcctacccgtttggccatggcttatcttataccacctttgcctattgtgatctggatcttctggtgcgcccggtgtcggacgaaactgcacaggatgagacggtgcttaccgtgagttttactgtaagcaatacgggcgatcgtgctggggctacagtacctcaggtctatctgggctttccggatgccacagtggatcgttgtgtacgggaacttaaagcattcttacgtgtggaacttgacccgggcgaaagtcgatcgattaccattgacttgactcgccgtgatctgtcgtattgggatattcttctgcactcatggaccgtggaaccgggcactgtacgtgtagaggttggcattagctcgcgagacctcccgctgacaggcgaagtcatcctggatgcgccaacagtgcgccacccgctgcgtcgtgactcgacggtggccgagtggatggacgcagatgaagagtttgcagcaaaagtgcgccgcgcgaccgaacaaactggcattgatttagatagcgatccgacgaccgccgcgtttattctggcgatgccggcctacaaaatgctgcagatggcacctattatgacgcccgaagaactggataagatgctgggggactga

SEQ ID NO: 905 - DNA, 2520 bp, Artificial Sequence
  6xHis UPI0002C5A938
atgcatcaccatcatcatcatgaaaacctttatttccagggttcaatggatcctcatgatacgccaaccccgttagatcctgatgtgactgcactggaagagctggcctctcgtctgacgcttgaacagaaagtgcagttaatcacaggccgcgatttctggacaacatggcctgtggagggaatcggactgcgtcgcatgctggtgtcggacggtccttcgggtgttcgtggagaggtttgggatgaacgttctccttcattaaacctgccgtcggccagcgcactgagtagctcgtgggacacgggtattgccgcccgctatggtcgcgcgagcgctgttgaagcccggcgtaaaggtgtcgatgtagtccttggacctaccattaacctgcatcggagtccttatggtggacgccattttgaagcattttcggaagatccactgttaaccgcagatcttgccgcggcctatgtcgcaggtgtccaagagaatggcgttggcgccacgccgaagcattatgtggcaaacgaatatgaatccgaccgcttcaccgcggactcagttgtatctgaacgggcgttacgtgaactgtaccttgcggcctttgaaaaagccgtcgttgaatcacgtgcctggctggtcatgtccagttataacagcatcaacggtaccactagcacggaaaatgatctgttagagacccccctgaattccgaatgggggttcgacggcgtggtggtgagcgattggacgggtgtgcgtagcgtggatgcggcgcgtgcgtcgcaggacttagagatgcctggtccggtcggcgcttggggtgatgttctgctcgatgcggtgcgtgatggccgagttccggagagtgatattgaccgcaaagttattcgcctacttcgcctagccgcgcgggtgggcgcgttagaagggttcgatgctgtcgctccggccccggtagctgttgaagatggcgtagcatttgctcgtaccggtgccgccgcgggaaccgtccttgtacgaaatgcaggcgggattctcccactcgacgcgagtgccctccgttcagtggccgtaattgggcataatgcagtggaagcgcgtacgcagggcggaggttccgctacagtgattccggaacatgtcgttacccctctggatggtattcgcgatgccctgggagatggtgtggatgtgcgttatgcccgcggtgccgtggtccaaaaaggtattcaggaactacccctggcggaaatccgtaatccgcgtactggagagcctggtgccctggtgcgctttctggatgccgatggtggggaaatgttcacggaagaccgccgtgccacgacgttgatgtattttggtggagatgcaccgacgggcaccgccgcagtcatcggaatcaccacccgttggactcctgcaaccacgggggaagttttggcaggcttcagtgctacgggacgcggccgtgtgtgcgcggacggcgcgcttctgcgtgaagatggtgcggcacccgcaggaatggatcttggcgcgagccttttaagccctccgagcatttcggcccctcttcaagcgacaacgggacagccggttgatctgcgcgtggagtttgaactgacctcagccccaggtggactagcaggcattctggggattactatgggaatcgaagcggatgagtcagctccagagcgcctattggatgaagctgtggaagctgcgaccggcgcggatgtagctatagttgtggtcgggaccaatgctcaagtcgaaagcgaaggcttcgatcgtgattcactggccttaccgggccgccaagatgaactcgtgaggcgcgttgcagcggccaacccgcgtacaatcgtagtcgtgaacagtggttcgccggtgctgctgccgtggcgcgatgatgtgcaggccttagtactcgcatggttcggtggacaggagtttggcggagcattagccgacgtattgttcggcgatgttgaacctggtggccggttgccgaccacttggccggcgaccgaagaagatgtccctgttcgcagcgttaccccagtggacggacgcgttgtgtacgatgagggtatacacgtgggttaccgtgcttggttacgctcgggcgcgacgccagcctacccgttcggccacggtctgggctacacgacgcatgcaattgatgatttacgtgtggccgaagacggcgctgggggtattacagctactgtaacggtcacaaataccggtgatcgcgccggcaaacaagtagtacaggcatacctgagccgggccggtagcgccgtagatcgccccgtacgctggctggctgggtttgccgcagtacaactggaagcgggggccagcgccgaagtagatgtggctattggagcacgttcattcgcacattgggatggagggtggcagcgcgaacctggagcctttaggcttcatgtgggtacgagcgtggtagcgactcccctggaagcagaagtggatccggccgcctga

SEQ ID NO: 906 - DNA, 2295 bp, Artificial Sequence
  6xHis UPI0003DE3509
atgcaccatcatcatcatcatgaaaacttgtactttcagggcagtatgaacccggacctgacatcgttaacacttgaacaaaaagcggcgctgctgtctggacgcgacttttggagtaccaaagagattcctgaagctggtattccgagcatcgttctcaccgatggccctcacggaattcgacgtcagactggtggtagtgatcacctaggcatcaatgcggccgaacccagtacctgcttccctccggcggtcgctgtaggatcgtcctgggatcccgaaattgcgcgtcaagtcggcgccgcagtcggtcgcgaagctttagcgtttggcgtatccgtggttctggggccgggtgtgaatatcaaacggagcccgctctgcgggcgtaactttgagtactacagcgaagatcctctgttatccggcgtattaggtgcggcccatgttgccgccatgcaggaagttggtccgggagcttcagttaaacattttgccgcgaacaaccaggagcacgaacgtatgcgtattagctctgatgtcgatgaacgcaccctccgtgaaatttacctgccggcttttgaacgtgtagtcaccgaagcgcagcccgcaacagtgatggcgtcctacaacaagatcaatggggtatacgcctctcagaacccttggctattaaccgatgtccttcggaccgaatggggatttgccggagcagtcgtcagtgattggggagcggttagtgatcgtgtagctgcggtggccgcgggtatggatctggaaatgcctggtagtggtggcagcaccgatcagcaaattgtagatgcagtccgctcgggacggctggatgaaagcgttcttgatgaagctgtgcgacgtgtggttcagttagcccgtttacctcacacagcgtccggcgaactggatgtggaagggcatcatgcattagcccgtacgctagccgcggacagtattgtattgttgaaaaacgaacaggcaacactgcctctgggtgcaccgagtcgtatcgcggtcgtgggagccttcgcagttgaacctcgttttcagggaggaggatcgagccatattaacgcgacacgtaccgatgctgccctggactcaatccgtgaacacgctggcgcacgcggcattggtgtggaatacgcgccaggcttcgtactggcggacgcggaaggtgcagaacaacatcgccgtgaagcggtgagcgtagctagcggagcgggcgttgccattgttttcgcagggctgtctgaccgagaagaaagtgaaggatttgatcgtaccaccctgagcctccccggtgcgcaaattgccgtgatccgagaagttgcagccgtggcggaacgcacagtagttgtactgtctaacggcggggtggtttcgctggaaggctggcatgacgaagtggatgcgattgttgaggggtggcttctgggtcaggccggcggcagcgccattgccgatgtgctctttggggtggtaaatccgtccggtcatcttgccgagaccattcctctgcgcctgcaagataacccgagttggaacaactttcccggagaacagggtcatgttcgatatggtgaaggcgttatggtgggttatcgccattatgaaaccgccgcgcagccggttcggtatcccttcggctatggcttaagttataccacctttgaaacaggtgaccttcgagtagagactactggcagcgataccgcagcagtaactgttaccgttaccaatacaggcgcggtggcgggtaaacatgtagtgcaattatatgtgtcaaccactgcaggcccagtccgtagggctgcccgtgaactgcgtgcattcaccaaagtacgtctggaaccgggcgagagccgtacggtggaatttgcgctggatcgtcgcgcattcgcatattgggatattgaaagcgctggttgggtggtgccggccggtgattatgcgattcaaattggcgaagacgtgtctaggatagtagcggaacaaacgattaccttggccggcgatatccgtgtgcgccctttaacactggaaagcgccgtgggcgaatggttcgcccatccagtggtcggcccagttttgatgcagggtctgtcagccgggatgaccgatgaacaacgtaagcactccgaaaagaatccggacgagttgaaaatggtggagagcatgcctatgcgtcaatttctggcctttacgggtggcgcattcccgcctgaggcactggagcagcttatgcaactgtcacgtgcttccgccgttgcagtctga

SEQ ID NO: 907 - DNA, 2319 bp, Artificial Sequence
  6xHis UPI000507F38A
atgcaccatcaccatcatcatgaaaacttgtatttccaaggcagtatgacggatacgaatgcgagccgcccccagccggccttcccgaaggcgagtgatttgagcttagaagagaaagcgagtctgacatccggaggcgatgcatggcatttacagggcatcgaaagcaaaggcgtgcctggatatatgattaccgatggcccgcacggtctgcgtaagaccgaggaaaaaactggggcagtagacctgaatgaaagtgttccagcgacctgcttccctccagccgcgggcatggcgtcaagctggaaccctcagttggtggaagaggtaggccgtgcgatgggccaggaatgtattcaagagcaggtcgcggtaattctgggaccgggcgtgaatattaagcgtaacccgctgggtggtcgctgctttgaattttggtcagaagatccgtttttagccggacatgaagcggttggtattgtgagcggcgtccaatcacagggcgtcgggacaagtctgaaacactttgcagtgaataatcaggagaccgatcgcttacgcatttctgcgcgcgtgtctcaacgcgcattgcgagaaatttacctgcctgccttcgaatatattgtcaaaacggcgcaaccgtggaccgtgatgtgcgcgtataatcagattaatggcgtacatgcctcccaagatcactggctgttgaccgatgttctgcgaaaagagtggggctttactggaattgtaatgtctgattggggcgccgatcacgaccgtgttgctagcttaaacgccggcttgaatctagaaatgccgccctcgtatactgacgatcgcgtggtgagcgctgctcgcgatgggtcacttccggtagatcaactcgatagtatggcacagggaatgattgacctggccgcaaaagcagcccccgccatgtcccgtacagactacagatattcagtagatgaacatagggacgttgcgcgtcgcgcggcgagggaatctgcagtcctgttgaaaaatgagggcgcactgctgccgttggacccgaatggcaccgtcgcagtcattggtgaattcgcccggaccccccgctaccagggtggtggttcatcgcatattaccccaacagcggtgagttccttccttgatgcggcgggtgaacgaggggctaaagttgattttgcaccgggcttcacgctggatgatgaaccgcaggatgagtccttaacgagtcaggccgttgaatcagcgcgcaaggcgaaaagcgtgttacttttcttgggcctcccggaacaggaagaatcggaaggtgcggaccgcaccaatcttgatttaccggccaaacagctcgatttgcttaaagcggtaagcgcggtgaatcctcatgtggccgtcgttctatctaacggctccgtagtgtccattgccccgtggcgtgaccaggctcaggcaatactggaaggctggttgctaggtcaggatggtggccgcgccctggcggatctgatttatggcgattactctccgtccggcaagctggcccagaccattcctatggatttagccgatgatcccacaatgctgaattggcctggcgaagaaggccacgtagactatggcgaaggtgtgtatgtggggtaccgctactatgacagctttcacaaaccggtagcctacccgtttggcttcggcctgagctatgccagcttcgaactgtcggatgtccatgttactgcgaggcaaggaaacacagccactgtatcagttcgcgtaaccaacaccagcgatcgtgatgcagcggaaaccgtccaggtttatgtggcacccggcaaagctaaagtggcacgcccaagccacgagctcaaggccttccgaaaagtattcttgaaagcgggcgaaagccaggaaatctctattgatttggatgagcgcgccttcgcgtattggagcgaaacccatgcgggatggcgaatagaagctggggattacggtgtggaagtgggtactagctcgcgcgatatagccgcgacagtaaccatctctctgccgggtgacggaaaacgcttacccctgacggagtggagtactatggatgagtggcgcgaagacccggtgggcggcccgattatggaacgtatggaagcactcggacgcagtggtgaactgccggagctaccgattgataatgcgtcggcggccatttttctggcgagcatgcctatcaactcactgtttgtcctgatgggcggtaatggtagcaagttgaccaattatctgctggataactatgcacaggcgactcacgctgcctga

SEQ ID NO: 908 - DNA, 2310 bp, Artificial Sequence
  6xHis UPI000506119A
atgcaccatcatcatcaccatgaaaacttgtactttcaggggtcgatgtcagaaaccaacgccactccgacttatccgtctgtgaaagatctcaccctggaagaaaaagcaagcttaaccagcggcggagatgcctggcatttgcagagcgtggagcacaaaggtatccccggttacatgatcacggatggccctcacgggctgcgtaagagcctggctagtaacactagcgagaccgacctcaacgacagtgttcccgcgacctgtttcccgccggccgccgggctgtcgagcagctggaaccctgcgctcattcgtaaagtgggtgaagtgatgggcgaagaatgcgtgcaggagaaagtggcagtcattctgggtccgggtgtgaacattaaacgtaatccgctgggaggtcgctgttttgaatactggagtgaagatccttatctcgcaggccatgaagccgtcggtattgttgaaggagtgcagtccaaaggagtgggcacgtcgctgaaacattttgccgcaaacaatcaagaaacggatcgcttgcgcgtggacgcccgtattagccagcgtgcgttacgagaaatttatctgccggccttcgaacacatcgtaaaaaccgcccagccctggaccatcatgtgcagctataatcgtattaacggagttcactctgcacagaaccattggttgctgaccgacgttttacgtgatgaatggggctttaaaggcattgttatgtctgactggggcgcagatcacgatcgcgtcgcgtcattaaatgcgggactcaacctggaaatgcctccgtcatataccgatgatcaaatcgtgtatgcggcgcgcgatggtcgtatcgatcctgcacagctggatcgaatggcgcagggtatgatagatctgacgaataaggcaagagccgcgatgtctattgatggctaccgttttgatgtcgatgcccatgatgaagtagcccgtcaggccgcggttgagagtatagtcatgctaaaaaatgaagatgcgattttacccattgatccggccggtgggaaaaaattagccgttattggggaattcgcccgcaccccgcgctaccagggtggtggctcgtcgcacattactccgacaaagatgacctcttttctggatgcgcttgatgagcgtggcatcaaggccgattttgcgccaggttttaccctggatcttgcgcccgcggattcagccctgacgttagaagccgtagaaaccgcacgtgatgccgatgttgttctgatgtttttggggctgccagaggaggcagaatccgaggggtttgatcgcactacgttagacattcctgccaaacagatagaactgctgcgtcaggtggccgctgaaaatcctaacgtggtagttgtgctgtcgaatggcagcgttgtgacggtgcatccttgggcagacgcgtccaaaagcattttagagtcatggctcttaggacaagcgggtggtagagcgttagctgatgtggtatttggcgaagcgagcccctcaggtaaactcgcacagtctattcctatggatatcaatgatgatccctcgatgttaaactggccgggtgaagaaggccacgtcgactacggcgaaggcgtctttgtaggatatcgctactatgacacgtacaataaagccgtggattacccgttcggctatgggcttagttatgcgacctttgaaatcggtgacgtcgcagtggccaagacaggtgcgaatactgcgagcgtgactgcaactgtaacgaacacgagcgatacccctgcggcggaaacggtccaggtatacgttgcgccgggaaaagccgatgtcgcccgtccggtacatgaattgaaaggatttgaaaaagttttcctgggagcgggtgagtcgaagacggttactatcgaactcaacgaacgcgcctttgcttattggtcggagaaatacaatgattggcatgtggaggcgggtgaatataccgttgaagttggcgtgagcagccgtgatattgcagcgtccattgccgttactctggatggcgatggaaaaagtatgccattgaatgagtggtcaactttcggtgaatggagcgccgatcccgtgggtgcaaaagtcgttgaagcggtgggagctgctggcgagaggggtgatatgccgaagctgccggataatgatatgatgcgcctgttcttgaacagcatgccgattaatagccttccgaccctcctgggtgaatcagggaaagacctgaccgcgttcatgctggacgaatacgccgcacttaccaagtga

SEQ ID NO: 909 - DNA, 2430 bp, Artificial Sequence
  6xHis UPI0005A5CAC2
atgcaccatcaccaccatcatgaaaacctgtactttcagggctcaatgccgggccagccggcgcgtgcagccagcgttccagaatcagagcaacgtcgccaagcccatcagatcgtttcgcgtttggcgccggatgaaaaagcggcgttgctgtcaggtgcagatgcgtggcataccgtgggtttaggtcgcttagacgttgcctctgtgacgcttgcggatggaccagcaggtcttcgcaaagtcgccgacccagaagttggcgtcatgcgctttgacaatgcagtccgcgctactgcctttccggtgccggcagccttgggtaatagctttgatccggatgtcgtcgccatggttggtcgtgccatcggtgaagaagctcgtgaacagtccgtcggcgtagtgctgggccctggcattaatatcaaacgatcgcccttgggtggtcgtaactttgaatattatagcgaagatccgattctgtcggggcaactgggagccgcttgggttcaaggcctgcaatcgtgcggggtaggtgcatgcgtgaaacacttcgcagccaataaccaggaaacgcgtcgcatgactgcggatgcgttaattgatgaacagactttacatgaagtttacctccgtgcgtttgaacatgtggtgcgcactgcagacccatggactttgatgtgtgcatacaaccgcgttaacggtacgtattgcagcgaaagccattggttactgactgagctgttgcgcgatcagtggggctttgacggtctggtcgttagcgattggggcgcagttttagatcgcgttaggagcctggcggcgggcgtcgatctggctatgcctccggaccttgcccgtgatgccgcggacatccgttcagcaattgcgaggggaacactgagcccgcagggtcgtgatgaagcttgtgcgcgtgttgtagaactcgcacttaaggtaacacagggcaccacccgcgaactaggtcgccgggtaggagcgcatcaccatgtcgcgcgtgaggcagcgggtcggagcatcgtgttattgcgtaatcgagcagtggatgcaaacaatcatggctctgcgaatccggttctgccgctcgctcatggcgcgaaattagccgttattggagaatttgcggctaatccgcgcttccgtggtggcggatcttcccaggttgtccccatgttgctggatattccgttagatgaaattcgtggccgtgcggatgagcccgtacgctatgaggcggggtttcttttaagcggtgaatcggacgatgagttggccgaccgcgcggtggaagctgcagaggaggcggaagttgcagttgtttttgtcggcctcccagacgatgccgagagcgaaggactcgatcgcaccagtattctgttaccggcggtccagaccggcctagtgcagcgtatcgctgctgcaaatccacgcacggtggttgtcctcacgaacggcggcgtagtccagctcgcggaatggtcctcggaagttccagcgttagttgaagcctctttgttgggcgaagcaggtgggagcgccattgcggacatgctgtttggtgaggttaatccgtcaggtcgtctagcggaaaccatcccgctgcgactgcaagatacagccgcctatttcaatttcccgggcgatcgcaaccaggtacgttatgctgaaggcctccacgtaggctataaatggtacaacgcaagtcagttggaggtagcgtacccgtttgggcacgggttatcttacactcgttttagctataatggcctgcatctggccgccgatggtagtggcctgcacgcaagatttaccctccgcaataccggtgcccgtgttggccgtgaaatcccgcaactgtacgtcgcgttgcgcgcctcagcatatcgccgtgctggattcgaattcaaagcaagtgcggtggttcagttagcgccgggtgaacaacgtgaagtgacgttaagtgtgccaccggctgatctgggtgtatgggacgccgatctgcatcgatggctggttgaaggcggagattatgatgtggcggtgggcgcgagtagtcgtgacattcgcctgaatggcattgttacggtccgcggtgaagcgcgcccgcgtaccctagatcgcaattccacggtaagcgaatggctgagctcgcctctgatggcgcaatttttggcggtacaactggcgaacctggcgaccgatccggcagcaacggatggtgcgggacctcgcgaccctcaggaattcatgcgtctggcccatgatctgcgtctttcgcagttacccgttctggcgccgcagctgcatattagtcatgaacaaattgatcaacttatcgcggcggctggcatggatgcacgtccgcgtccccgtcgtattgatgatagcgatagcggcgcacgcacgtga

SEQ ID NO: 910 - DNA, 2451 bp, Artificial Sequence
  6xHis UPI0005EC18F9
atgcatcaccaccaccatcacgaaaatctgtacttccagggttcaatgactgccagcaccgaccatttacgcccactcttggagaaattgtcgctggaacaaaaagctgcgttagtgcaaggtgcggatttttggacaacagtaccgctcccggaaataggcctacgcgctttaacccttagcgatggcccggccggtgttcgcggaccgcgatgggacgaacgcgaaccttcattaaacctcccgagcggcagtgccctcgcggcgagctgggatgtagatttggcctaccgttacggcgcagctgcagcatccgaagcacgccgcaaaggtgtggatgtagtgctgggtccaaccattaacctgcatcgttcgcctctgggtggtcgtcattttgaatgcctgtcagaagatccggaattgactgcggaattaggtgccgcttacgtgagggggatgcaggaaaacggagttgccgcgacacccaagcattacgttgctaatgacagtgagaccgaccggttcactgtggacgtcgaggtagatgaacgtaccttacgcgaagtgtacctggcgccgtttgagcgtgccgtggaagcaggcgcgtggtctgtgatgtcggcctataacagcgtcgatggcgttacgatgaccgagaatgatcttctagaaaatccactgaactctgaatggggcttcgatggagtggtggttagtgattggacggcggttcgctcgctagacgccgtggccgcagcacaagatctcgcgatgccgggtccggcaccagcgtgggctgatctcgttgatgcagttcatgatggccgagttgatgaggccgatatcgaccgtaaagtgttgcgcattctactgctcgccgaacgcgttggtgcacttgaaggagcggatgccgtcgcaccggctcccttagatggaccagcgtttgctaaagaagccgcggtcgaaggcactgtcctgttgcaaaactccggcgtccttccacttgacttagcgggacttacaaaagtggcgataattggtcataacgcgaaagatgcccgcactcagggtggaggctcggcgacggtactgccggagaaagtagttagccctcttgatgcaattcgcgccgcgctgcccgctgcggaagtatcgtatgaaattggtgcggtagttcaggaaggcgttgcggaaatcccgctggcaagcatcgaaaacccggtaacaggtggtccgggcgtccgcgtcagctttcacggcgctgatggaaccgagctttttgcagaagatcgccgtgcgacagcactggtgtggttcggtggagacgccccgattggcgcgtcacgtaccattgtattagagacccgctatacgccggctgagtccggtgaaatccagcttggctttgccggcgctaacccgggtcgtatttttgtggatggggaattggttttggacgatgtgccggtaatcgaaggtaccgacctcggcgcggcgtttctgaaccctccgagtataactagcgccgtcacagtggaggccggacgtgcggtggatctgcgcgccgaatttacccgggaatctcgtggcgcccttgatggtgctttgtcagttacgctcgggattgcgccggaacgaaccgatcccgatgaactgattgcaagagccgccgctgccgccagcgcagccgaagtagccgttgtagtggtggggaccaactcaaaagtcgaaagcgaaggctatgatcgtgtggacttggatttaccgggacgtcaagatgatctggtacgcgcggtagctgccactggtactcctaccgtagttgtggtgaacgctgggagccccgttgtactaccgtgggcgggtgaagtggcggcgattgttcaggggtattttggaggtcaagaattcggccacgcaatcgcagaagtcctaaccggggcagcggaaccgggtggccgacttccaaccacttggccggcagcgcttgctgatgttccggttgccgacgttactccggtagatggtcgcttagtttacgcagaaggcttgcacattggatatcgagcttggttgaaggatgacgtccagcccgcctttccatttgggcatggcctgggctataccacctggtcttggggtaccgcgcaacggcatgatgatacggtcgaggtcaccttagctaatactggggaacgcgaaggtaaacaggtcgtccaagtatacgcggagagggcggatagcaccgtggaccgtcctgcgcgttggttggtgggcttcgccgttgttcacgcggagcctggtcgtaccgtgacagccgtcgtccctgtgcccgcgcgccgtctggcacactgggcgggagaatgggtggtggaaccaggagcgtacaccctgcgtgtaggctctagcgtcgcggacctgccactatcggttgagtgggtccaggcttga

SEQ ID NO: 911 - DNA, 2493 bp, Artificial Sequence
  6xHis UPI00094B6D3B
atgcaccaccaccaccatcatgaaaatttatatttccagggtagtatggcgcatgtggatgaagaactcctgggtaccctgattgcgacgctggacttagaacgtaaagtccgtctgctgaccggcgctgatttttggtctactccagccgagcccgcgattggtttacgtcgtatggttttaagtgatggtccatcgggcgtccgcggtgagagctttgacgagcgcgaaccttcgctaagcctaccgagttcaagcgccctaggcgcaacttgggatccggctgcagcccgtcgttacggttcagcgcttggcgcggaggcacgtcgccagcatgccgacgctgtactgggtccgaccattaatttacatcgcactccctacggcggacggcactttgaggccctgtccgaagatccgctactgacagcggaacttgccgcagcctatgtagaaggtctgcaagcccacggcgtcgctgcgaccccgaaacattatgtggcgaacgatgcggaaaccgagcgcttctcagtcgacaaccgtgtcggcgatagggccttgcgtgaactgtatctggcggcgtttgagccggttgtgacccgcgccggtgcgtgggccgtaatgtcggcttacaacgcggtcaacgggacaactatgagcgagaacccattgctggctgaacctcttaccggtgaatggggctttgatgggctggtgatgagcgattggggcggcgcacgctcaacggaagcctctgcacgagcggaacagcatctggttatgcctggtcctgttagtgcatggggggcacgtctcgtggaagccgtacgggatggacgcgtaggtgaagatgtgattgatggtaaagtgcgacgattgcttcgtttagcagcgcgtgtgggagcattagacggcgtaccgccgcaagttacggaacctccaccggctgaagacggcgcggcagtggcacgcgaactggcagcagcgggctctgtgttggtacgtaatacgcgagcggatggtgccgcagagctgccgtgggatcatgctgtgccgggttcagttgcggtactcggccacaacgccgcgcttgcccgtactcaggggggtggtagcgcaacggtgcgtccggcagccgtggtcagcccgctggatggtcttcgtgcggcactgggtgcagatcgtgtacgctacagactgggagcgcaggtggcggagggcgtgcagccgtttgacccagcgagtattaccaaccccgttacgggcgggtcgggactgcgtgccgtttttcgtgatgttgggggcgcggctttgcgaaccgaggatcgtctcagctccagcctcatttggatgggtgcggaaattccagaaggcacagatcatgtcgagattgcactgcgctgggacgcgcctgcgggcgcgcatcgcttaggtgcagctgctgtagggcatgtggtcctggttgccggcggcacgaccgtactggatgcggacggagttctgacgggggatgaaggcccgggtgcggccattttcgaagcgccaagcgtgacggccggtgtgacgaccgacggcccggtggacctggtactccgatttcgcccttcaggtcaggaagccggtatgccgttagtagccgttaccgttggggaagagacggttgtggatgatccagacgctgaaattgcggccgcagctgccttagccgctggaaccgatgttgcggttgtggtagtggggaccaacgatcgcatcgaaagcgaagggtttgatagatccaccttggccctgccgggccgacaagatgatctggttcgtgctgtggcggcggcgaacccccgaacagtagtagtcgtaaattcgggggcgcctgttctgctcccgtggcgcgatgaagtggcagccattctgttgggatggtttgggggtgagcagtttggtgaagccgtggctgatgtgctgcttggagccgccgagccaggtgggcgccttccaacgacttggccgggtactggtcgcgaacggagcgtcctctcaggcgtgccgagcgacggagtcctgcgttacgacgaaggtgtgcatgcgggtcatcgtaattggttgcgtcatggtgaaaccccggcctacccgtttggccatggactgggatacactacgtggacgttagatggcatgtccgtgggccgctggtcggcagatggaatagatgttaccgttaccctgactaatattggcgaccggccgggacgtcaggtggtacaggcatatctgagccgcgaccgtagcgatgtagaacgcccggcccgctggttagcgggatgggcagttgtagatgccgccccgggtacaaccactgtgaccgtcccagtgtcgcggcgcgcgtttcgccatcgcacgggaacgggctgggcgacggaaccgggcacttggacgttgcatctgggcttttccgtgaccgatactccgttggccgctgaggtgacaaccacctga

SEQ ID NO: 912 - DNA, 2913 bp, Artificial Sequence
  6xHis UPI000BC13DF0
atgcatcatcatcaccatcatgaaaacctgtacttccaaggttcaatgcaagcacccctgagctctgatcgtaaaatggcgattaaagctcttcctaaatacttgcagagagaagtaaatgaagcgttagagggcctaaacctcgaggaacaggttagccttctatcaggcgctgacttttggcgcacggtggaaattcagggacgtgttgcgggtattaagactacagatggccctagcggtgcacgcggccaattcttttcgaacgggactaaagcagcgtttttcccgtgtggcgtttctttagcagccacctgggatacgagcttaatccaccagattggtaaggcgctcggggaagaagcacaatccaagcaagctaatgttttattggcccccacagtgtgtaatcaccgtagtccgctggggggccgcaactttgaatcatttagcgaagatccgtatctgagcggcaagttagcggcggcctatgttaacggtgtacagtcacggggcgtcgcagttaccatgaaacattttgttgccaacgaacaggagaccaaacgctttaccgtgaatgaaattatcgaagaacgtaccctccgcgagatttatctgaaaccgttcgagattgcgatgcgagacgcggggccgtgggccattatgtgctcgtacaatgctatcaacggccagcacgcggacgtaaatgatcttacgatgaaacagattctacgcaaagaatggggctacgacggtctggtgatgtctgactggggagggacccacgatactgtggactccattaaatcaggcctcgacttggaaatgccgggaccggcccaccgtcgtggacagagtttattgaaggcaattaaagagagcaacaacgatccggagctgctagctgcggtaaaaaccggcgcccgtcatgtgcttgaactgatagcgcgcaccggaaaatgggggcgctttggtgaggaaccggaaagcgcgaacgataaacccgaacatcgcgcactgattcgcaaagccggtaccgagggtattgtgctgttaaaaaacgaaaataatgccctcccgattccgaccagcgtaaaaaaaattgcgtggattggtccgaatgccaatgaatgcatagcgggcggtggcggctcggccaacctaaatccgcattatctgacaaatcctcttgattcaatccgtggtgcggtgaaagaacacaatattgaagtcaactacgagattgggtgccagacggaaaagtgggtaaaagcctttccgattaccgaaggcggagtcaaaactagccccgcccgcggcgaagatggtatgattctggagttttttgaaggtcgccgttgccaaggcgaagtggcggaggcgcgtattatgaagacgagcaccatttttctggttgatggaaaacccgcgagcctgggagataaagattactccgtacgtctgaccgcatttctgaccccgcaggtttctggcgaacacattttagggctgggcgcagtgggtcctaccaaagtgtatctgaacaatgagctgttcctggatcacacccactgggcgaccacgggcgaattattctttacctcaggcagtgaagaggtaaccaagaaagtcgtgctgcaagccggtgaatggtacaaaattgtggccgaatctacaacgaaatcgccggatcagaaactgccggatatggataacgatagccttgattttgcgagcgcagttggtatccgcttgggactggatctggtccgcgatatgcaggaatacatatctcgtgcggcagcgttagcatcggagagcgacgtagcagttgtggtagtgggaatgaataacgaatgggaaagcgaaggttacgatcgccacagcatggatctccccggccgtcagaatgaactcatttctgccgtcgcaaaggtaaacccccagacaatcatagttaatcagtcgggctgcgcagtgtccatgccttggctagaagaagtgcagggtctgcttcaggtgtggtatcaaggtcaagagtctgggaatgcgctggcaaacgttctgctagggaaaaaggccccgggcgggcgtctccctattagctttccgaagcgtgtggaggacaatccgtcttgggggaatttcggtgatggggcgacgaagagcgagattcagtatagcgaaggtgtgtttgttggttaccgacattacacgtcgcgtgatattcccgttctgtttccgttcggctttggcctgtcctataccacgttctctatttctctggtgggctttactggaggcaaaaacacactggcccctggtaccaccgctaccgtagagatggctattaagaatacggggaaagtcacgagcagcgaaactgtacaggtgtatattagcccgcgtaccggctcatccgccgagcgtccggccatggaattgatggggtttgcaaaagctgagctgcagccgcgtgaagaaaaattcgtaaaagttgaactggacgagtttgcggtgggctacttcgaaatgtccgtcggcaagtggcgtgcagaacgtggtgtctacgaagtgagcgttggacgtagcgtggaggacgttattctcaaactggaagtcattgttgaagaaacgaaagcggctaaaccgcgcttatacctgggtagtcctggtccatccgcaagtctgtttgtgactcgttatttctaccgctgcgagcatcctagtctgttacgcgcgcccggccgctggagcccggcccctactgaattgaccgaccgatataccccgctgacccaacgcccgcaatttgccccgttagccccgaactttcaaattttgcagcgtgtacgccgacgtcagatccttccgagagaaaaccgtaaacagtggactccgtctgaaaactga

SEQ ID NO: 913 - DNA, 2376 bp, Artificial Sequence
  6xHis UPI000E5B4EA5
atgcaccaccatcatcaccacgaaaatctgtattttcagggtagcatgacgaccgtgcatccggatgattatgcagatagggcatctgaattggtcgcggccatgacccttgacgagaaagcgtcgttaacaagcggcgccgatttttggaacctgaagactgtggaacgcctgggcttgggcgctgtaatggttacggacggcccgcatggtctgcgcaaagccaccaacgatgccgaaattggtattggtcaggcggtccccgcgacgtgctttcccaccgcggcagccctgggttctacctgggacgatgaattactagaacaggtgggagcggcgctcggcgaagaagcccgtgcggcgggtgtagcggtagtgctgggcccgggtgttaatatgaaacgtagccccttgtgtggccgcaacttcgaatactttagcgaggatccgctagtggcggggcgcgcaggcgctgcaatggtgcgtggcgttcagtcacagggagtagggactagcgttaaacacttcgcagctaacagtcaggaaaccgatcgcatgcggattgatgcgcggatcggcgaacgcgccttacgtgaaatctacctcccggcctttgaacgtatcgttactcaaacacgcccgtggaccgttatgtgtgcgtacaataaggtgaatggtacgtacgcgtcacaacatccgtggctcctaactactgtactccgagaagactggggctttggaggcctagtggtcagcgattggggtgctgtggatcaacgcgtacctggcttagcggcgggactggaccttgaaatgccagcgtcgggcggcgtgaccgatgagcagattgcgcgagccgttcgcacaggagaactcgatgaagccgtactcgatcgcgccgtgcagcgtatcgtggccctgattttggccgcacaagcagtggagccgggtacaggctttgacaccgacgcgcatcatgaactagctagaaaagcggctgccgccggcgcagtcttgctgcgtaatgaaccggtggacggttccccggtgctgccgttagatgcaagggatattaccggccaggcgccattagtagtgattggcgaatttgcccgtacgccgcgctaccagggagcgggttcaagtcaaatcaacccaacacgcctcgactcagcgctggacgcgttacgcgaacagttaggtggggcagtacgcttcgaaccaggctacagactggcagaagcgacaggcatgccgggccaagaattaacggatgatgagttagcggaccgtgcggtcgaagccgcccgcggcgccaccgtagtattgttcgcaggtctgccagctgcagttgaatcagaagggtacgatcgcgatgacattgagctgccgaacgcccaaacaactttaattgaacgtgtgtcagcagtggccgcccgtaccaccgtggtgctgagcaacggctcagttgttagcgttgcgagttggcgtgagaaggtggatgccctgttagaatgttggttaggagggcagggcggaggaagtgcaacggcggatgttctgttaggtcgtagctgtccagggggccatctggccgagtcaattccattagccctgagcgatgtcccggcacaattaaatttccctggcagccattcgcgcgtagatcacggggaaggtgtgtttgttggctatcgcggtcttgatactatgggtcgcgaagtagcgtatcctttcggcttcggcctgacatatacgacattcgaacttaccggcgtacaggcaacgccggtggttacggttgcggatggaacgggtttagatgagaccgtagccgtagttcgcgggacgttaaccaacaccggtcagcgcaccggagcacaagtggtccagttgtatctaggccgccatgaggcatcccgcgtcgctcgtgccccccgtgaactgcgtggctatgaaaaaatcaccctggccccgggtcagagtgcaccgtttgaatttgcgctctctcgacgtgacctctcgtattgggacgaagggaccggttgctggcaagttgaacctggcgcataccgcgcctgggttggcttttcgagccgagatgccgcagcggttctgccgcttcaagttactgcacctgaacctgcgtcgccgctgggcaaagattccacctacgcggaatggatggcacatccggtgggcggccctctgctacgtacagatgcacgcgcgtttgtggatgacatggcaagtagtggggcctatgaactgtttgccgcgatgcctttggaacgtttagtccgcttgccgggcagtctcctagcgcctgaagattacttaactctactggaccgagctcaagcgggtcaagattga

SEQ ID NO: 914 - DNA, 2649 bp, Artificial Sequence
  6xHis UPI001004B2C9
atgcaccatcatcaccatcatgaaaacctttatttccaaggtagcatgacacaaccgccgacggatgcgaagttgcttgagttgctgagccagctgactacgtcagagaaaatcagtctgttagccggcaagaatagctgggaaacccagaacatagatcgcctgaacattccgagtttaaaggtaagcgatggtccaaacggcgcgcgcggcgccgattttctggatggccgtaccgcagcctgctttccggcctgtgttagtctggcagcaaccttcaatcgtaagttggcgcgtcgtgttggcgtagccctagcgcaagaaacccaaacaaaaggcgcgtacgtcttacttggtccgactgtctgtcctcataggtcaccgctggggggacgcaactttgaatcgttttccgaggaccctctgctggcgggcgaacttgcatcggaatatgtcttaggcctccaaagcgaacgtgttggtgcgacagtgaaacattacgcgattaatgagcaggatacccgccgctttaccgtgaatgaaaccgtgtcggatcgtgcgatgcgtgaaatctacctgcgtccgtttgaaattatcattaagaaatccgatccgtggtgcattatgaccagttatcctaaggtgaatggtcactacgttgatgatcaaacgaccttactgaaagacatcctgagagacgactggggttataaaggcctgacgatgacagattggggagccgcgtctgccgcggtcgatgcgggaattagaaacggtctggatctggaaatgccaggaccgccgcaccgacgcaaaggtgatgtagttcagaaactcattgacgacggcaaagtcgatttaaaagatattgatgaacatgtgttaaacatcctaaaactgttacgccagacggggaaatttaccgatcgccgggagccggtgccggaatacagtgtgagccgtccggaacacgaacgcctgattcgtgaagctggcgcggaaggtatggtgattctcaaaaataccggcaataccctcccgctgaaagctagttcgctgaaaaatattgccgtattgggtcctttagcaaaacaaacagctgcgcatggcgggggcagcgcctctttaaactgtcattacaaagtttcaccgttcgacgcggtcacctcacgcttaggggattccaaagtctcttattctaagggcgcgcatgtttttcgcacctaccccgattttactgcaggcgcggtcaatcgcaacggcaatcctggattcatttgcgatttctttaagaccctggatatgtcagataaagcattccatacaagcgagtatccgcgaggctcatttatgtcaatcatgaatgcggaaatagacgatgccaaggccgtccgcatgaccactacctataccccggatgtgagcggtaaacactatttaagcttttcaggcatgggcccaaccaaattgtttattaatggagtgttcctgggcgagatcaaagagacggaagaagccatgatgttcttccttggtgcacaggaagaggagcacgttcagtatgattttaaagcgggtcagaaatacgaaatactggtggaaagcactataagtcccgtgcctaatgccgaactgtttctggcggaagacaaacttgcggtgcacttggggtttattgaacaacaggaaatggaagcggacgtactctcggagagcgtggaattggcgaaacaggcagatgtcgccctcatctttgtgggtaatacccctcagtgggaaactgaaggtcaggacatggcaaccatggctctgccggcggatggcagccaggataaacttattactgaagtggccaaagtcaatccgaacaccatcgttgttatcggtaccggagtcccggtggagctgccctggctagatcaagtagccgctgttgtacagacgtggtacggcggccaggaaacgggcaatgccgtgcttgatgtgttgctgggtgaagtcgaatacgtagaaggtgttaatgtgggttaccgccattttgactcgcagtatggtaccgaaaaagaggtgctgtttccgttcggtttcggcctgagttacagcaccttcgaagtgagcgggaccgtactgtcgggcgcgttgagcgagggtgatgcgaatagtgaagttgcgataaccaccagcgtgtgcaacacctcggaccgtgcaggtagcgaagtagtgcaggtctacctagccccgccgaaaggagcacaaagtaaaggtcgcccgcccaaagcgttagtagccttcgataaagttcacctggcaccgggcgaaaaaaaggaactgcagctgtcgttcaaacgtgacggcgcagcgttttggtctgaggatgataagtcttggcgtgtggaagcaggcgaccatgaggtgtacgttagcacctccagctcgccgcaggatattaaaagcactcacactttgtctgtgccccagggatttacttttaacgcgtacgacattctgggagtcatcagtaagaaaaaatgtaaccagcgctgcggcttctttaacctggcaatcacgctagatggcatgtggtgtaaatatcaccttattcgcgtgcccctggtagaaaaactctctgaacactggggcttgtcctga

SEQ ID NO: 915 - DNA, 2463 bp, Artificial Sequence
  6xHis UPI0001B69B5C
atgcaccatcatcatcaccatgagaatctctatttccagggttccatgacgccaccttacgttgatattgaccacatcctgggatcgctgaccctgaacaaaaaaatctcattgcttgcaggtgaatcagactggcagaccgttggtattccgagcaaaggcgttccggcagttaaggtgtctgacggcccaaacggggcccgtggtgcgagttttgtgaattccaccacggctgcgtgctttccggccgcctgttgcattgcagcaacctttgactccgatctggcgcgcgatatcggcgaggcgatggcagaagagacgcgctcgaaaggtgcccgctgcttactgggtcctacggtgtgcatccacaggcacccgttaggtggtcgtaacttcgagtcattctcagaagatccgttcctgagttggaaattagcggcacagtatattaacggcctgcagagccaaggtgtgagtgcgaccattaaacactttgcggccaacgagcaagaaacccaacgcctgacggttgacacagtggtaggcgagcgggccttgcgtgagatataccttcgtccgtttgagatagcggtgaaggaggcaaacccttgggcaattatgaccagttataacctgctcaacggcgaacacgccgactcgaacaaatatctcctccagcaggtgctgcgtggagattggggctgggaaggtttagttgtcagcgactggggcggcaccaactcaactgcagatgcgctgaatgctggcttagaccttgaaatgccgggccctacccgctggcgcaaacaggaggcggtgctggaagcgattcgcgcgggccagctgacagaggaaaccatagatcaacgcgttaaacagttattggcctttctggaacggttgggatgttttcgcgatccgcgtatccctgatgaacaggccattaatgatccaagacaccgctcactgatccgcgaagtgggtagtcgcggtctggtactgctgaagaatgatgccaacatcttacctctgaaaccggcggaactgcatggcaaaaaaatcgccctgttggggcatgcgaaaaccgcccttgcccacggtgggggttcggcgtcaattgttgcccactacaaagttaccccgtgggacgcactgaaaaacgccctgggcgaccaagttgccctgagctacgccaagggtgcagataccctgcgttatttaccgccggtgactacgggcgtactggatctggatgggaacccgggctttacctataagcgttacgaaccgaacaatccagtgcccgtcgaaattaaacagatgcatcctgactcattcgtaagcgtctttgcgagcgtcggcttccgcgattgcgatgttagtttagaaggtctgtttgaagttcacgaaaccggagaatactattttagctgcgcgggtctgggcccgtccaaattactaattgatgatcagctagtcgaagaacagacggataactacccagatgctatgggctttatgtttggtggtgccttctcaaatacgattaaggtgcatttagatggtggccgtaaatacaaaatctcggcgcacacatccccgcctacgccgaaagaaggtgaagtggaggacatggggttactagaaggccatgtaggactgcaagttggttttgccccggcgctgcagctggattgggattatactgcggaagcggttcatctagcccaggaaacggatatggcgattgtgttcaccggtcatgaaccggtgtgggaaacggaagggaaagatcaggttagctttcatctgcctaaagatggttcgcaagaccggctggtgtcagcagttgcggaagttaacccgaacgtaattgtcgtcaactcgaccggagtgcctattgctatgccgtggctcgacaaaattaaagcgttggttcagagttggtacccgggtcaggaatgtggcaacgctattgctgatatcttaacgggacgtacaacgcccgaaggtcatttaccttgtacattcccgcgtgatattagggattgtcccgcgtatggtaattttcctggccaaagcgtgaataaaaaattaaccgtgacgtatcaagagggagtgtttgtcgggtatcgtcacttcgatctgttagcagacgataagatcaactttccctttggcttcggtctgtcctataccagctttgatcttcaggactttagcgtgcagaagacgaataacaacactcttgatgaaaacgcacctaaaacggatccgaaaaaacagttggcggggtttaaaaaagttcgcctgcagccgcaagaatcgcaggttgttcgcattccgatacaggatcgtgactttgcgacctatgatgaagcggaacgtcgttgggcagtacgaggaggcgtatatagatttatgctaggttccacctttgccccatctcatcacattcattga

SEQ ID NO: 916 - DNA, 2406 bp, Artificial Sequence
  6xHis UPI00023EBB15
atgcatcatcatcatcatcacgagaacttatatttccaggggagtatgacagatgtcgaccatctgttagacaggctgacacttgatgaaaaagtgtctctgcttactggccaagacttttggagcttacccgcaatgccgcggattggccttcgcagcgttgtcatgtctgatggtccggtgggagttcgtggtaccggctgggcacccgaaaacccgagcattgcgttgcctagtccaacggctctggcggcgtcatgggatccggaattggctgtggaagcaggtcgtctgctgggtcaagaggcacgcgcgaaaggtgttcatgtggtactgggccctaccgttaacttgcatcgcacaccgctgggaggtcgtcacttcgaatgctattcggaagacccgctgctaacaggcgaaattgcggcggggtttgttcggggtgttcaagaacatggagttggcacgacggtaaaacatctggtggggaatgattttgaaacagagcgcatgaccgtagatgtgcgcattccagaacgagccctacgtgaactatatctggcgccgtttgagcgtgtggttgaagcgggaggttggggagtaatgagtgcatataatggcgtaaatggtgcatcaatggcgcagaatggtaggttgcaagatgaagtcctaaaacgtgaatggggtttcgacggagtggtagtttccgattggcgtgcggctcgcgatactgtaggcgccgcgttaggaggattggatattgccatgcctgccatggataacccgtggggcccacggctggcggcggccgtgcgatcaggtcaagtgccggtagaagttgttgacgataaagtgcgccgcctgctccgccttgcagcccgtgtaggagcgttaggcgcacccccggtggtgacggctgcggcagtggatggtggagaagtagcgcatcgcgttgccgcacgcagctttgttcttacgcgcaatagaggcgttctgccgctgccgccggaacgcaccggtggcatagccgtgataggggcattggcccaggatgcgcgtgtgctgggtggcgggagtgcgcaagtggctcctcctcatgttatctcaccattagatggaatccgccgtgtgtttggcgatgtagcgtatgccgtaggagctgacccgagaccgtttcttccggcagcgcaaggtccaggctggagcgcattcacaattgatctgggtgcctaccgctttgaagtgccgaccgcggcggttcgctggttaggtgatccgccgggtggactcgccgttccggatgttaccacccttgagctcacgaccacgtatacccctgagattggtggtgagcacgtgttcgcggtaagcggctttggtacctttcaattaaccgtggggggccaggaattgtaccgcgggtccctgcatccccccggcaccggtcgtgccgacttgctgttacatccccgtgaacagcgtttccctgtgcgcttagcggccggcgaacctgtgcgtctgaccttgcgtcaatcgtttgcgccaggtaccgcgcatagcgcgggtacaaccttaggccaccggcctccaggtcccgatgcggacggcttgattgccgaagcggtcgatctggcacgtcactgcgatgttgccgtggttgtggtgggcacaacggaacaggtcgagagtgaaggttttgaccgcacgagtctggccctgccgggacgtcaggacgaattagtagcgcgtgtcgccgcagcaaatccgtcaacagtcgtagtggttaatgccggagccccggtgcttttaccttgggcggacgaagtagctgcggtgctgctgacatggtttcccggacaggaagccggcgcagcgctcgctgcagttttaagtggtgccgaggaaccgggtggtcgcttgccgactacctggccgcgccacgagaccgattgtccggtattaactgtgcagcctcgcgatggagtggtgacatacgatgagggtattttcattggataccgcggttggcgcgccgctcccttgtacgcttttggctctggatctggctacaccacttgggaatattcagggttgaccgcgaccgccactgaagttgcggtgactgtaactaacagcgggcaacgtgccggccgcgaagtggtgcaaatctatttatcggcacgcgacgatggtgccgtggagcgaccggaacgatggctagccggttttgcgagcgttaccgctgacgcaggcgagcgcgttacggtgcgtattccgctgccagaacgcgcgtttcaggtgtggacggatggctggcgtacgctaccgggtcgctacaccgtgatcgccgcgcatgcactggatgatccgcgcctgacagcagaaatagaaaaaccacaggcctga

SEQ ID NO: 917 - DNA, 2526 bp, Artificial Sequence
  6xHis UPI0003289BC6
atgcatcaccatcaccatcatgagaacctgtacttccaaggttcgatggctgcggcttcaagcacgtctaatagtaaagcgttgcgccgcgaagcagtggataccgccttagccgccctgggcctcgatgataaaacccgcctgctggcgggccaggatctgtggtcgctccctgcactgcccgcaattggcctgcgaagcctggtcatgagtgatggtccaattggtgtgcgtggcgtgcgttggaccgcagccgatccgagcgttgcactaccgtctccgacggcgctggctgcaacttgggatccggaattagcacgacgtgcgggtaggttactggcccaagaagcccgtcgaaaaggagtgcatgtgctacttgcgccaacggttaatctgcaccgtaccccactgggtggccgtcatttcgaagcctatagcgaagatccctatctgacaggtgaaatcgggacgggctacgttcgaggggtacaggatggtggcgtcgccacaacagtgaaacacttcgtagcgaatgatgccgaaacagatcgttttacagttaataacacagtggcaccacgcccgttacgtgaactatacttagcgccctttgaacgcattgtccgcaacgcgcacccgtgggggattatggcggcttataatcaggttaacggcagcaccatgaccgagcaccgttatctgcagaacgcggtgctacgtggggaatgggggtttgatggctttatcgtgtctgattggcttgccgcgcgtaccacggttggagcgataacaggcggtctagacgccgctatgccgggcccacgtaccgtctatggagaaacccttgcagatgccgtccgtgcaggcgaagtggacgagaaaattgtggatctggcggtgcgcaatatcctgctattagcagcaagggtaggcgccctagaatctgcccccccggccgttccggccgccgcgctgccggctaccgtagacggtgatgcccttgcccgtgaaattgcacgccggagcttcgtactggtgcggaacgaggtccacgatggcgcagacgccctcccgctggcccctggcacgacagtagcgctgtctggcgccctggccagagacgcgcgcgttttaggcggtggtagtgcgctggtgttccccgatcacgttgttagcccgctggatggcttgactgcagcgctcccggagggtgccctgacttatgcggtgggagcggatccaagcgacgaattggcgatagctgaggcgggattcgacctaaccgcagtgtgccgtgacgcgtcaggtgcggttctcgccaccgtcccattaccttctggtcagattcagtggattggcgcggatcttcctgacggtgtaacgcacgataccctggacaccgtggagattacgggtaccttcactccgcgtgcgagtggtgaacatacttttggcacacggggtaccggctcatttgcgctgaccgttgatgatcggccgttgtttgatggtacccaggatcgtgcccctggtaccgacccattgggtgcgttttttaacgaacctgttgagcggggacgtttaccgctgactgaaggcgcccctgtgcgagtcagcctttcacatcgtccgggtccgggaacaggacatcctctgaaaggggtagcgtttagcttagtacatctggctcccctgcgcgatccggatgaactgattgcggaagcagttgaagcggcgcgtagcgcagacactgcgattgtcgtagtgggcaccaccgaacgtgtcgaaagcgaaggctttgaccgtacagacttgaaactgccgggacatcaggacgcattagtccacgcggtcgcagcggtgaatccgcgcaccgttgtggttgtgaattcagggagtcctgtggaattgccctggcgtaatgaggtagccgccgtgctgctatcatggtttccggggcaggaagcaggccatgccctagcagacgtcttgcgtggtcaggaggaaccgggcggtcgtctgcctaccacctggccggtagcactcgcggacgttccagtgtccgccactactcctactaatggcgaattaccgtacaccgagggtgtatttattggttatcgcgcatgggaaaaagcaggtacgacccctgcttatgcgttcggccatgggctcggttatacgacatgggagtatgaagacgtttcagcaactcctgactcagttactgtgcgtgtgcgaaatacgggcagccgtcccggatctgacactgtgcaaatctatctagcgcctgcaccggccccggacgcacccgagcgtcctgcgcgttggttggccggcttcgcccgtgtgaccgcggcccccggcggtagcgtggaagtgaccgtgccggtggaagcgcgtgcttatcaagtttgggatgaggaagcctacgggtggaaaacagtcccgggtacctatgaagttcaagcggcccgtagtttggcggatgtgcgtgcgacgacaactgtggatatcactgcatga

SEQ ID NO: 918 - DNA, 2559 bp, Artificial Sequence
  6xHis UPI0003E02BF1
atgcaccatcaccatcaccatgagaatctgtacttccagggcagcatgatgaccacagatattgaagcggtgttgaaaagcttgaccttggaagaaaagattagtctgctggcgggacagaatttttgggagacagtgccggtgccgggtaaagtgccgcacattaaaacaagcgatggcccgaatggcgcgcgcggcgccgactttaccggcggtacccgtgcagcctgcttccctgcagcttcgaacgttgctgcaacctttgatttagacattgcaaatcgaattggccaggcgctggcggaagagacgcaaagcaaaggagcgcgctgtctcctcgcacctaccacatgcatccaccggcatccgctcggcggacgtaattttgagagcttcagcgaagatcctctgttaagtggtaagctggcgtcacaggttattcagggagtgcagagcaaaggtgttgcagcgaccattaaacattttgcggccaacgagcaggagaccgaacgcatgagcgttgatgagaccattagcgagcgcgcccttcgtgagatctatctcagaccgttcgagattgccgtaaaagaggctaagccgtgggccgtgatgactgcgtataattgcgtaaacggcgaacattgtgatagtaacgcgtttaatttcaaagtgctgcgcgaagaatgggggtggaaaggcctggtcatgagcgattggggtgggaccaatagcactgctgaagcactgaacgcgggcttagatcttgagatgccgggccccaccaatcgtcgcaagatccccgatgtattagccgcgattaaagagggtaaaactactgagagggcaatcgacgatcgtgcccgtgccgttctggagttcattgatcgtctgaaagcattcgaggacccgacgattccgcctgaacaggcaatcaataaaccggaacatcaggcactgatccgtgaagcgggcgcaaaaggctgcgtgttgctaaaaaacgataacggtgtgcttccgctgagcaaggacaaggttaaaggtaaaaaagtggccgtgtttggccttgcaaagaccccgctggcacatggtggcggcagtgcatcagtcaacgcgcactataaaattgccccttgggacgccttacaggaagcagtaggcgactcggctgagttggtgtacagccagggagctcatacccaacgtatcttgctgcctataggggaagataaatctgcaggttcgatagtgggcctggatggtaaaccgggctttaccctccaggtctttgacaatgccacgcaagcaattgaagaaacgactcatggccatcctagcagttcaatctcaccgttgggctcgaaagcaactctttacaaaatccttgagtttgtcggcgactttacaccgaccgagtcaggttcgcattacctgggctgcaccggcttaggcctgacgcaggtatatgttaatgataaactggtatatgatcagcagaaagctagcccggacgcaatgggctttctctttggagccatttccgaagatgaatttacgtacccatttaccgcgggcaacgcctaccgtattcgtgtacgcagcctcccaccgattgatgtgcctggtctggaaattttaaacggccgttcgggcgtgcgccttggtttacagctggcctcggaacacgatgccgatttacaaggcgaagccgttgcgctcgccaaggacgccgattacgcattagtgtttaccggtcatgatcctcagtgggagacggagggccaagatcaggaatcttttaatctgccgcggaagggcactcaagatgccctgatatccgccgtcgccaaagtcaacccaaacaccgtcgtgatcaatagcaccggcgtggcgatagcgttgccgtggctggagcaagtcagctcgctggtgcacgcggggttcccgggtcaggagtgcggcaattctattgtagatgttataaccggcgcggtcaaccccgaaggtcgcttaccgatgagtttcccgaaacgcctcgaagatgcgccggcgtatggaaactttccgggcgaatacgtcaacggtcagctgaaggttgaatacaaagaaggggtcttcgtgggataccgtcactacgaccgtatcggccgcgataaagtgaacttcgcattcggtcacggcttgtcttatactacattcgcgaccgatagtcttcgcgtgtcacgaaaatcagaaacggaattttcagccagtgttaacgtgaccaataccggcaaaacacagggcggcaccctggttcagttgtatgcggggaacgccacgacttcaccagagcatccgataaagggtctggtagccttcaaaaaaatccggctggaacccgggcagacccaaaccgtcgatctggctgttgccgcccgcgatttgggcttttttgacgagtcgcgtggccagtgggttgtgccggccggacagtatgactttagcctgggggaaagtgcattagatattattcagaccgtgaaagtagcagtggagaaagaactaaccagcgcaccgtga

SEQ ID NO: 919 - DNA, 2313 bp, Artificial Sequence
  6xHis UPI0005025F2E
atgcaccaccatcatcatcatgagaacctgtatttccaaggtagcatgtcggaacagaacagcgaacgtaaggcgacccttccgcaggccaaggatctgagcgtcgaggaacaatctgctctgacatccggtaccaacccgtggagtatcggccgtgtagaaggcaaaggcctaccgaattataccattaccgatggtccgcatggcctccgcaaggcccgagatctagatggcatggatgtagatgcggcggtgccggcgacttgctttcccccggcagcaggcatgagtagctcatggaaccccgaactgatcaaaaaaacgggtgaagcgatgggtgaagaatgtgtccaagagcaagtagccgtcatcctgggcccgggtgttaacatcaaacgtaacccgctgggcggccgttgcttcgagttttggagcgaagatccttacctagcggggcatgaagcaattggcgaagtcgaaggtattcagtcgaagggcattggcacttctttgaagcattttgcagcaaacaaccaggagaccgatcgtcttcgtgttaatgcgcgcatctctgaacgcgccatgcgtgaaatttatcttccggcgtttgaacatattattaaaaacgcgcagccgtggactgtgatgtgctcttacaaccgtatcaacggtgagtacgcctcgcagaatagctggttacttactgacgtcttgcgtaaagaatggggctttaagggcatcgtaatgtctgactggggagcagtacatgaccgtgccgccgcgttgaatgcgggtctgaatctagaaatgccgccgacccacaccgatgataaaatcgtgcaggcggtgcgcgacggacaggtgaaacccgaacagctggaagccatgtcgcagggcatgattgacctcgtggcgaagacccagccggctatggaaaaaggagcggcaggctatcgatatgacgtggacgagcacgatgagattgctagagaggccgcacgcgaggctatggtgcttctaaagaacgaagatggccttttaccagtgaagccgggtaccaagctggcagtgatcggcgaatttgcgcgtacccctcgctatcaaggtgcagggagctccttgattaaccctaacaaattaacgtcattcctagatgcgctgaaggatcgaggagtggaagccgaattcgcgccggggtttacgctggatggagatgagcagagtcaagagttgacggacgaagcggttaacgccgccgaaagcgcggataccgtgctgttatttatcggtttaccagcagaagcggaatctgaaggctttgatcgtaccaccctggacatccctgcgaaacagattgaggtcctgaaggccgtctcagctgttaacaaaaatgttgttgtgattctgtcgaacggtagtgttgttagcatgccgtgggcggatcaggcgaaaagcattctggaatgttggcttctcggtcaggcaggtggggccgcaaccgcagatgtggtgtttggcgatgtaaatccgtcgggtaaattggcgcaaacgatcgtgaataacctggatgacgacccgtcgatgctgaactggccgggcgaagaaggacatgtggattatggcgagggtgtgtttgtgggttatcgctattacgattcgtttcataaagcagtcacctacccgttcggttatggcctgagctatactacctttgatatcagcgaagtaaatgcccagaaatcggggccacagagtgtacacgttacagcgatggtcaccaacacaggcagtatggcgggcgcagaagtcgtgcaagtatacgtggcgccgccagcgtgtagagtggaccgcccagtgcatgaactgaaagcgtttaaaaaagtctttttggaaccaggccagtctcaggaagtgtcgtttgatctggatagtcgcgccttcgcttactggagtgaacgatttgaagattggaaagtagagggtggaagctacgggatcgaagtgggtgatagctcccgttcaattgcgcagacagtgccggtgcagctggacgatgatggcaaacgcatgaaactgacgaaatggtcaacgtacggcgaatggcgtgaagacccggatggcaacaaaattctggacaaagtgattagtgaactggaagcgaaatacggccacgccattatccccgatagccagctcatcattatgttcctgaaaagcgcacctctgggtgggatgtctatggtcctgggtgccaacgaagcccaagatatctgtgagcgtgccttggcggaatatgcgaaaattgggcgttga

SEQ ID NO: 920 - DNA, 2280 bp, Artificial Sequence
  6xHis UPI0005084E52
atgcatcatcaccaccaccatgaaaacttgtatttccagggctcaatgagcgattacccgagcgtgaacgacttaacgctggaagagaaagcggcgttaacgtctggtacgaatccgtggtcactgggaaatgtggccgcgaaaggcctgcccaactataccattactgatggccctcacggcctgcgcaaagctcaaaacactgagtcaatggatgttgaagaaaatgttcccgcaacgtgtttcccgcccgcggcaggtatggcgtgcagctggaatccggagctggttgaacgtgtaggggaggcgatgggggaagaatgcatacaagaacaggttgcagtaattctgggtccgggcgtcaatattaaacgcaatccgctcggtggccgttgcttcgaatattggagcgaagacccgtatcttgccggccataccgcggttggcatcgtaaaaggcgttcaaagcaaaggtgtcggaacttctctgaagcacttcgccgcgaataatcaggaaaccgatcgtttacgcatctcggcaaccattagccctcgcgcaatgcgtgaaatctatctaccagcgtttgaatacattgttaagactgcccagccgtggacggtgatgtgtagctataacaaaattaacggtgtcttttccagccagaatcgctggctgctgacggatgtgttacgtggggaatggggcttcaaggggattgtgatgtcagactggggggcagtgtcagatcgcgtggcagcgctgaatgcggggttaaatttggaaatgccgccgtccaatacggacgatcagattgtggcagctgcgaaagatggtcgtattccagccgcacagttggacgaaatggcgcagggcatgattgatctggtcgcgaaggcgcgccctgccatgtcccgcgatggatatcgttatgatgtggatgcacataatgaagttgcgcgtcaggccgctgtagaaagtatggtgctcttaaaaaatgaagacgctaccctgccagttgcaaagggcgccaaaattgcggtaattggcgagtttgcgcgtaccccgcgctatcagggtgcgggcagcagcctgatcaatccgactaaactgacctctttcttagatgccattgaagaacggggtgtggccgcggattttgcccctggctttactctggatgatgccgctcaagatccggcgctgaccgaacaagcagtgacggccgcacagcaggcggatgtagttttgctgtttctaggccttccggctgcttacgaatcggagggttttgaccgcacaaccctggatattccggccaagcaggttgaagtgctggatgcagtggctgcggccaacccaaacgtggcggtggtgttatccaacggcagcgttgtgtcgatgccctggcgaggccgtgcgaaagccatcttagaaacttggcttttaggtcaagccgggggtgccgcgcttgccgatgtaatttttggcgacgaaacgccctcgggcaaattagcccagaccattatcgatgatgttaacgatgatccgagtgcaatgaactggccgggagaggaaggtcacgtagattacggcgaaggtgtgttcgtaggttaccgctatcacgatacctttcgcaaacaggttacataccccttcggatacggcctgagctatgctaccttcgatgtgcatgatgcgaccgtagcgaaaacgggtcctcgtaccgcggaagttacagtgactgttactaacacgagcgatgtagcgggagccgagactgtccaagtttatgtcgccccgcctaaagcgaaagtagcacgcccagtacatgagttgaaaggctttgccaaagttgcactggaaccgggggaaagtaagaatgtcactattgccctggatgaccgcgcctttgcctactggtccgaacgctttgacgattggcacgtggaaggtggaacctacactgtcgaggtgggcgtgtcgagtcgggatattgtcagccgtattgatgtagaaattgatgacgacggtaagattatgaacctggacgagtggagcacttttggcgaatggttagatgatccaatcggtgccccaattctgcagcatgtgctcgacgatatggcgaaagaagccggtcaccctgtgatacctgactccgcgctgatggttatgttcttacgttccatgccgctgcgttcgctcagcgtcattctcggtgaagccggagaacaagtcgcagcaaatctgactgaagcatatcgcaaagcgacggcgtga

SEQ ID NO: 921 - DNA, 2559 bp, Artificial Sequence
  6xHis UPI00059674D6
atgcaccatcaccatcatcacgaaaacttgtattttcagggcagcatggcacctacggatgtgaacgccgttctgtccaaactgactctggaagagaaaatctccattctcgcgggggccgatttttggcaaacggtacccattccggaaaaaggcgtgccggcgttaaagaccagcgacggcccgaatggagcgcgaggggaaaccttttcaggtggcgttaccgcggcgtgtttcccggccgcatgttccgtagcgagcacatttgatgttgatattgcacgtcgtatcggcgtagcccttggtgaagagacgcttaccaagggagcgcgttgtttactcggaccgacgatctgcggtcaccgtcaccctcttgggggccggaattttgaaagtttcagtgaagatccctttttggcgggtactcttgcgtctcagagcgtgcaaggcatccagagcaccggagtggcggcgaccatgaaacattacgccgtgaacgagcaggaaaccgaacgcctgagtgtggatgaaattgtggacgaacgtacgatgcgcgagatttacctgcgcccgtttgaacgggtagtaaaggaggcgaaaccggctgccgtaatgaccggctacaatcaggttaacggaagccattgtgatagccacgaattcctattaaaacaggtcttgcgtggagaatggggttgggacggcttagtgatgtctgattggggaggggtgaatagcgtagcggaaagcttgaatgcgggcctggacctggaaatgcctggtcctacgcgctggcgaaaagtagatgaagttgtggcggctgtaaaggcggggaaagtatcggaggaaacgattaatgaccgtgcgatccatgtactgcgcttcttagaacgccagaactgtttcaaggatccgactatcccaccggagcaggcggtgaacaaacccgagcatcaagcattgattcgcgaggccggcagcaagggtattgtcctgctgaaaaacaatgacaacgtactgccactgactaaggaaaaggcgcgtggcaaaaaaatcgccctgttgggacttgctaaagaatcgttagcacatgggggtggcagcgcaagtctgaacgcgcattacaaaattactccgtgggatgcgttgcaggaagcatacaagggtgaaaacgtggagttcacctatgcgaaaggcgcccataccctacgtcaacttccagtgattaccaaaaatgtggtagacgtggatggaaaacccggctttacgtggcgtagctatcatgtgggcgaaagccaaccgtacaacactgtgggtggtcatgctaagagcgaaattagcttgttagatggcctgaacatggtgaacaccagcatcgagctggagggcacttttaccgcaagcgaaagcgcgacctactacttcacgctgtccggtcttggcccgagtagcgtcgcaattaatggcacagtggtctttgaacaggaagataattgctcggatccgatgggctttctcctgggtggtgttgcgagcccgctggttaaatatgagttcgaaagcggtaaacagtataagatcttgcttaaatcaacccctccggctcccgtcgaaggtgttgacttggggatcctggaaggcaaagtgggggtacgcctgggtaatatgtctgccagcgaacatgataaagatatcctgacggaagcgattgatctcgccaaagcggcggactacgccattgtctttactggccatgatccctcatgggagacagaaggtcaggaccagcattcgtttaacctcccgaaagatggcagccaggatcgtctggtatcgggcgtggcagcagttaaccaaaacacgattgtcgtgaatagtacaggcgtcgcggtagccatgccgtggctggacgaaatcaagtcactggtacacacttggtttccgggtcaggaagcgggcaatagcattgctgatgtactgacaggggaacgaaaccctgaagggcacctgacctgtacctttccgaaacgactcgaagattgtccggcctacggtaactttcctggcgaatataatggccgccagctgacggtaaaatatgcggaaggcgtattcgtcggatatcgtcatttcgaccgtcttccggccgaaaaagtgaactttccgtttgggtttggtctcagctacaccacctttggtttctcagattttgacgtgaagcccaccgccgcgggcgatgagtggacggcgagtgtcaaagtcactaataccggctcggtcaaaggcgcaattgccgtgcagctctatgttggtaactcaaaaacctccccggaaaatccggttaaaagcctggtgagctttaagaaggtgaccttagccgcaggcggatcagcggtggtcgaattgcctgctcagggtcgggatattgccttctggtcgcagcaggaacacaaatgggtgttagaggccggcgagtacaacttcagtgtgggcaagagcgcgggggatctggtggcaaccgccacggttcaggtcgggggtaaaacctacgccccatga

SEQ ID NO: 922 - DNA, 2292 bp, Artificial Sequence
  6xHis UPI0006C6D6F9
atgcatcatcatcatcaccatgaaaacctgtattttcagggcagcatgtcggagaaaacgtatcctagcatcaatgatctcaccctggaagaaaaagcctcactgacctcggggggtgatgcgtggcatctgcagggggtggaagcgaaaggtattccgggctatatgatcactgatggcccacatggattacgcaaatctaactcagcaaccaccggcgaagtggacctcaacaactgcgttccggccacttgtttcccaccggccgctggtctgtctagctcctggaacccggaacttattcaccaagtgggagaggcgatggcggaagagtgcattcaagagaaagtggcagtaatactgggtcctggcgtcaatattaagcgcaatcccctgggtggccgttgtttcgaatattggagcgaggacccttatctggcgggccatgaagcgatcgggattgtggcgggtgttcaatctaaaggggtaggcacatctttaaaacactttgcagcgaataatcaggaaaccgaccgcctgcgcattagcgccaatatttcgcaacgagcactgcgcgaaatttactttccggcattcgaacatatagtgaaagaggcgcagccgtggaccattatgtgtgcgtataactgtattaacggcgtgcatgccgctcaagatcattggctcttgaccgacgttttgcgtgatgagtggggtttccaaggcattgtcatgtctgattggggtgcagatcacgatcgcgtggcctccctgaacgcaggtttgaatttagaaatgcctccgtcgtataccgatgatcaaattgtttatgctgcacgtgacggccgcattcagccggcccagcttgatcacatggcacagggcatgatcgatttagtgaacaaaacccgtgccgcgatgagtattgaaaactatcgctttgacatagaagcgcatgatgaggtcgctcaccaggccgcaattgagagtatggttctgctgaagaatgacgatgcgatcttgcccattgccggcgacgcgaaggtgacggttattggcgaatttgcccgcacaccgcgctaccagggcggcggtagttcgcatattacccccaccaaaatgactagcttcctggacaccctgactgaacgaggcgtggacgctaaattcgcaccgggatttaccctggacttagaaccggcagacccggcgttggaagcagaagcagttgatgccgccaaaggtgcagacgtggtcctgatgttcctcggcctgcctgaagccgccgaaagcgaaggttttgatcgcgaaaccctggatatgcctgccaaacaaatcgctcttctggaagcggtagcggccgaaaataaaaatgtggttgtggtgttatcaaacgggagcgtagttacggtggcgccctgggccaaaaacgcaaaaggcatcctggaatcgtggctgctgggacaaagtggtggtccggccctggccgatgtgctttttggtaaagtctcgccctcgggtaagctcgcccagaccatcccgttcgacatcaatgatgatccgagtaccattaactggccgggcgaagaaggccatgttgattatggggaaggcgtgtttgtcggctatcgctattacgacacctataataaagccgtcgactaccctttcggctttggcctgagctatgcgacctttgaagttagtgatgtgaaagccgttaagaccggtgcatgtaccgcgagtgtgtcggcggtggtgaagaataccagcaatgtcgatgcggcagaaactgtgcaggtgtatgtggcgccgggtaaggcggatgttgttcgccccaaacacgaacttaagggcttcaaaaaggtttttctgaaagcgggtgagtcagcggaagtttcatttgaattggacgatcgggcgtttgcttactggagcgaacgtttcaatgattggcatgtcgaatccggtgaatatacaatcgaagtgggcaccagctctcgtgatattgcgggctcagcggtcgtcgaactcgacggcgatggaaaagctcagccactgacagagtggagcaattttatggagtggcgcaaagatcccctcggctctaaagtcttggaaattctccgcgcagaaggagaagcgggccgtatgccggttgttcccgataatgatatgactcgcctgttcttggattccatgccgatcaactcaatgagcgtgctgatgggcgcggatggcaaacagattttcgagtatatgctggaaaaatacgcggaacttaccaaatga

SEQ ID NO: 923 - DNA, 2484 bp, Artificial Sequence
  6xHis UPI00094ABAB3
atgcatcaccaccatcatcatgaaaatctttacttccagggcagtatggcgacagttgatgaagatctgcttaccactttgattgctcgcttggatttagatgcgaaagttcgtttacttaccggcgcagatttctggagcaccccggcagagccagccatcggcttgcgccgcatggtcttgagcgatggccctagcggggtacgcggcgaaagctttgatgaacgcagtccgtcactctcactgccgagtagcaccgcactgggtgcgacatgggatcctgagttagcccgccgttatgggtccaccttgggggcggaagcccgtcgacaacatgctgacgtcgtcctcggtcccaccatcaatctacaccgcaccccatttggaggacgtcatttcgaagcgttgtccgaagatcctctactgactggtgaattagccgcggcgtacgtggaaggtttacaggcccacggcgtcgcggcgacgccaaagcattacgttgcgaatgatgcggagagcgaacgctttaccgtcgataatgtggtgggcgaacgcgcactccacgaactttacttagctgcttttgaacctgccgttactcgtggcggagcctgggctgtgatgagcgcatacaacgccgtcaatggcgcgacgatgagcgaaaatcctctgttaacggaaccactgaccggcgagtggggatttgatggattggtcatgtctgattggggcgctgttcgcaccaccgtggcaagcgcacgtgcagagcagcatctggttatgccggggccggtctcaacgtggggagaacgtttagtagcagccgttcgcggaggcgaggtcgatgagtcagttgtggatggcaaactgcgtcgtcttttacgtttagcggcacgcgttggcgcactcgacggagggccgacccctcccccggcacccgcccctggagatggtgcaacggtagctcgtgaactggcagcagcaggcagtgtgctggtgcgtaataccggagaactaccgtgggatgccagcgcgctgggcaccgtcgccgtgcttggccataacgcagccctggcacgcacacaaggaggcggttccgccaccgttcgtccggcggcggtagtggccccgcttgatggtttacgtaccgctcttggtggagatcgtgttcgctatcgtctcggcgcccaagtagcagagggggttcagcctttcgatccggaaacggtcaccgatcctgttaccggggaaccaggcttacgcgcagtttttcgggccgcggatggaacagctttacgctctgagcaccgtcttggcgcctcactgatttggatgtccggcgaaatcccgggcggcgcggaaaccgttgaggtatccactcgttggagtccggagccgggagcacatcgcatcggcgcagctgctgtgggccatgttactgtgagtgcggatggagcgaccgttctggatacagaagctgtgctaacgggtgatgaaggccctggtgcggcaatttttgaagctccgagcgcgaccgcggaaattaccaccgacgctccggtggacctggttttccgttttaggccgtcgggcggtgaagcaggtatggcgctctttgcgctgactgttggaaccgaaaccgtggttgcggatcctcgcgctgaggtagccgcagcagcctcgttagccgccgattgtgatgtagcggttgtcgtagtgggtaccaatgatcgaattgaatctgaagggttcgacagaacgagcctggcgctgccgggtcatcaagatgaccttgtgcgcgcagtagcggccgccaatccgcgcacagtagtagtggtcaacagtggcgcacctgtcctattaccgtggcgcgatgaggttgccgcagtcctactgggttggtttggaggtgagcgttttggcgatgccgtggctgatgtgctgttaggccatgcggagccaggcggaaggttaccgactacctggcctgccaccggcgaagaacgaagtgttctgagcggccgtccgacggatggtgtgctgcgctatgatgagggcgtgcatctgggtcatcgcaactggttgcgtcatggggaaactcctgcctacccgtttggtcacggcttaggctatacgacctggaccctcgatgatgctgtggctggcccgtggagcgcggacggcgtggctgtgactgtaaccttgacgaacaccggcgatcgtgctggacgtcaggtcgttcaggcctatttatcgcgtaccggcagcgatgttgaacgccctgcacgttggttagcaggttgggccgtggtggatgccgcccccgggactactaccgcaacggttaccgtgagtcgccgcgcattccgtcatcgggcgggcggagtgtgggcgaccgagccagggacctacgaactgcacctgggcttcagcgttgctgatacgccgctccacgcaaccgtagaagttgttggagaggggtga

SEQ ID NO: 924 - DNA, 2529 bp, Artificial Sequence
  6xHis UPI000CB49A0B
atgcatcatcaccaccaccacgaaaatttatattttcagggttcgatgggcactgcgcatgacttggaacagctgattgcaggcctcaccctagaagagaagattgcgctgcttgccggcgatagcttatggaccgtccccggtatcccacgcctgggaattcggcccttaaaagtgagcgatggaccggcaggagtgcgtggttcacgcattgtccctgcggctgcgtttccggcccctgtgctattaggcgcgacttgggaccctgaactggttgaacgtgttggccaggccttagcggaagaagcagagaccaaaggcgcacaggtcgtattagccccgactattaatcttcaacgcactgcactgggcggtcgtaactttgaatgcttctcggaagatccgcatctgacagcgcggctggctgtggcctatgtgcgcggtctgcaaagccgcggcattggtgcgtgcattaaacattatgtggcaaacgatcaagaattcgaacgccataccgtgtccgtcgaagtggatgaacgcaccctgagggaagtgtatctttttccgttcgcggtggcggtggcggaagctgatccctggtgcgtgatggccgcatataatcgagtgggcggtatttactgcagtgaacatccgtggctactgaccaccattctgcgggaagaactgggctatcaaggcgtagtcatgagcgactggtttgcgacgcatagcaccatcgaagcactgcaggctggcctcgatttggaaatgcctggccctccgcagtggcgcggggataagctgcgtgaagcggttgagcgtggagaggttgccttagaggtaatcgaacgctcagcgaggcgtgtgcttatgctataccaacgtgcggggcgtttcgcgcctggaccggaaacttctgaagaacgcgccgttgatcgtcccgaacaccgcgcgttgattcgcgaagtgggtgcatcgggcatggtgctcctgcgtaatgaaggtattctgccattagatttaagcactgtgaaaagggtcgctgttattggcccgcatgttcgccgcccggcagtaggcggcggcggatcggcatttgttcgtagtcacccggtcgtgacccctctggaagcacttcgagaaagtgcgccccagtgcgaattcctggtagaagagggggccgccatctttaaattgatccctccgttagaaggcgaagcgctaggcagtgagggagctgagctggcgttctttgccaatccggaactagcgggcgcaccagttgcaacaattcgcgttcgcacaacggatctcatctggctgggtgaagtggcgccgggggtagacgcatcagcgttctcggcgcgtctgcgcgtgaccatgcgcccggaagagagtggtagatatgtacttggcgcaaccgcagtaggtcaagtacgcgtgcatctggacgggaccttggtcctagataactggaccgcaccgcagccgggccgtacgtattttgggttcggttctgccgaggtccgagcggcagtcgatctggaggctgaacgtgcttacgaaattgtggtcgagtacaggaaatttcagccggggctcccactggcagggttccgctttggtgtagtacacgaacttagcgatgaggagcggattgcgcgctcagttcgggcggcccagcaagccgatttagctctgctgtttgtaggtctgtcgccggaatgggaatcggaagggtttgaccgcgaaagctttgacttaccgggcgcgcagaatgccttggtgactgccgtagcggatgctaacccgaatactgtggttgtgttaaccgcaggatctccggtgaatctgccgtggttggaacgcgtaggtgctctcttgctggcgtggtatgcgggtgaagaagtcggccatgctgttgtagatgtcttaacaggcgtacgcgaaccggcaggccgtctgccgtttacctatccacagcgtcttgaggatacgccggcattcctgaactatccgggtgaatttggacgcctgcgctattgcgaaggcctgttcattggttatcgctggtacgacgcccgccagattgaaccactgttcccctttggctttggattaggctatacccgtttcgcctatcgcgaccttgtgctggatagggaaagcctggggggagaagaaaaactgactgtgacctgcaccgtggagaatgttggggagcgtgcgggtagcgaggtggtacaactttatctggcctttccgccgggcaccgttcgtcgtccgttaaaagaactccgcggattccgtcgcgtgcacctgatgcctcagggcagcgcgagtgtcagttttaccgtgagcccgcgtgatctggcttattttgatgaagccgcacgcgaatgggttgccccgccgggggaatacgagattatgattggcgctcacgcacgggatattcgcttgcgtggtcgttttcttttgcgtgaggaacttcgttgggatgctggtggacgttttcgcgatgtgtga

SEQ ID NO: 925 - DNA, 2544 bp, Artificial Sequence
  6xHis UPI000E38A995
atgcatcatcatcaccaccacgagaatctgtactttcagggctcgatgggcagcacagtggatatcgaaggcctcatttcgcagctgaccctggaggaaaagattagcctgctggcaggtcaaaacttttgggaaaccgtgccggtacctcgactgaacattccgtcactgaaagtatctgatggaccgaatggggctcgcggcgctcaatttaaaggtggtgtcaaggcagcgtgctttcctgcgagcgtaagcttagcagccacctgggatcaaagtcttccgcagaaaattggcaatgcgctggcggaagaaacaatctctaagggcgcgtatgtactgttagcaccaaccgtgtgtccgcaccgtagccctttggggggccgcaacttcgaaagttttagtgaagacccattcctcgcggggcagttagcgacgtcttacattattggcttgcaggagaaaggtgtcggtgcaaccatcaagcattttgtggcaaacgaacaggagacccgacgtttcactatgaatgtgaatgtgtcggaacgagcgctgcgcgagatttacctgaagccgtttgaaattgctataaaaaaagcggagccctgggccctgatgaccagctataacctggtgaacggaactcatgcggacctgaacgaacacttactacagacaattctgagggaacagtggggcttcaaaggtctggttatgagcgactgggggggcaccaattcgtgtgcggagagcattacagcgggattggatctggagatgccgggaccagcaaaccgccgtaaaatggaggacgtgaagaaagcgatctctagcggtaccttgcaggtagaatcaatcgacggttgcgtacgtgccattatgaaactcctggagaaaacgggcaagttcgccaagccggaaacgccccctgaacaagctatttcattacctgcccatcagaaactgattcgtgaagcaggggcgcagggtatcgttcttctgaaaaatgaaaataacattctgccactgaaaaagtcaggcgtgaaatcgattgcagcactgggattagctaaggaatgcctggcgcatggcggtggctcagccgcagtatcgtgtcactacaaaatcacaccgtatgaagcactggaacgcaccctgggcaaagatgtggacttacgttttgcgcagggcgccaaaatctttcgcaatctgccagatatggtagaagggctgttctctctggaaaacaaaccgggtctgaccttgagccgttacgataccagagatttctcatcgaccccggaagtaagctctcatgacatgggtacgtacatccctctcgaatcacgctgtgaagctgcgcgccttgaaggcgtgtatcgtccgacagtgacaggtagccactatctgagtttctcctcactggggccgagcaaattcctcatcaacgataaggttgtactggagacgacgaaaaattcagacgacagcatgggtttcctgctgggtggtgtggtcgaagagattgtatcttttgacttcgtggctggggaggagtacaaaattcgcctggagaccgtggcacctaaagatgaggcggagggtggcctgagcttgctcgaaggtctactcggtattcacctcggttttatgctgcagagtgactacgaagccgatctgttgacggatgcggtcgagattgcaaagacctccgatatcgctttaatttttgttggcaatacaccggtatgggaaacggaaggacaggatatgaccaccatgtccctgccggcgaacggcagccaggacgcccttataaaggctgtttgcgaggttaatagtaacgttatcattatcaattcaacgggggtagccatctctatgccttggctgtcgagtgttagtgcgatggtacagacctggttcccgggacaggaggccgggaactccatcgtagatgtgctgttcggtgatgtgaacccgggcggtaaactaccgatcagcatacctcatcgaattgaagatactcctgcctacggcaacttcccgggcgacgtggataccctccaagtgacataccaggagggggtggaaatcggctatcgcttctacgataaaaagccggaacgcgtccttttcccgtttgggttcggtctatcctactcaaactttgagattagcagcgtaaccgtagagggcaaagtgttagcgaacggaggcaccatttcggtgtccgccgatgtgaaaaacgtggaaggcgctgcgggccatgaggtggtccaagtatatattgcaccgctgaactcaaaagttgaccgcccgattaagacccttgccggctttgcaaaagtggccctagcaagtggtgaaagcaaaactgcgcaggtttccgtcagctatgagtccgctgcattttgggacgaaactctgaatatgtggaaagtggaggaaggcgattatgagatcttagtgggcaatagtagcgccaatatcgtgagcaaggagaagatcaccgtggaagaaacctttacctacggcccgtga

SEQ ID NO: 926 - DNA, 2613 bp, Artificial Sequence
  6xHis UPI001102DFA3
atgcatcaccaccaccatcacgagaatctgtattttcagggcagcatggatgccacaaccctgaaagagatcgaagaaaccctggcccaactgacgttggaggagaaaatttcattattggcaggcaaagatttctggcgaacagtgccactgccggaaaagcaaattccttccatcaaagtcagtgatgggcctagcggtgcccgcggggacaccttttcggggggccaaaaagctgcgttcttcccgagcggcattctcatgggtgcaactttcaatcctgagcttgcatatgagaccggcgctttactgggagaagaagtcaaagcgaagagcgcgagtgtacttctggcacccacagcgtgttgccatcgaagccccctaggtggccgtaactttgaatcctactctgaagatcctttgttgagcggtaaaatggcctcagggtacattcgcggtgttcagagcagaggcattgccgccaccatgaaacatttcgttgcaaacgagcaggagacgtggcgcctgtatgtagatgagacaattgacgaaacgaccctgcgtgaaatctacttaaagccgttcgaaattgcgatgcgcgagggccagccttgggcgatcatgactgcctacaacatcattaatggcgtgcactgcgatagccatccgttagcactcaagcaggtgctgcgcggcgaatggaactatgagggtcttgtaatgtcagattggttcgggtgtaatagtatggtcgaatccctgttagccggcctggatctggaaatgccagggccggcgcgcaaacggcccattaaagagtttgtagaagcggcggaaaaggacgaatctatccgcaaagcgattgatgactcggcgcgtcgtattttaacactcattgctaaggttggtaagtggaaagatatgacccccgaggcccctgagtattctaggaacgatcctgaaaccggtaaactgatccgtcgagctggcggggaaggtaccgttctgctgaaaaatgaaggtaaaaccttgcccctgcagccaggcagcttaaaaaaggtcgcttttattggcccgaacgcgaaagccaccgttgcaggcggtggaggtagtgcttctctggaaccgaactacctgacccaaccgtatgaaaccttcgtgaatgccataaaagaaattaacggcgacattgaagtcccgtgggttcagggctgcattatagatcgttgggtccctaatattgatgttgaaggcgggttttgcagagtgggcggtccggatagcgaagcgggtttattcctggaatggtttcgcggttacgaagcgacgggggaacccgtggcgacaactgtgtttaaaacctcgaacgccttcctgtgggatagccgtccgacctcaatcagcccgtccgaagagttcagtgtgaaattcagcggtcagattagcgtgccggaggatggcaagtataatatttctttatcgaccattaccgcatcaaaactgtacttgaacggcgaactgctcattgataattgggatttcaaagaacgcggcaatctgatgatgaatgtgggcagcgaagaagtggttaaaacaattgagcttaagaagggtgaatggtacccgatcttagttcataatagctcgatttggcctaaagacagtccacgcgatccgccgatggaagagattggcgctctgggcattcgtttaggtgttgctcctgtgtacgacaatgcggtcttgatcgcggaagcggcagacgcggtgaaagacgccgatgcggtggttattgtggtgggtttgaacaacgaatgggaatccgaatcatacgaccggtctgatacgaaactgcctaacaaccaagatgatctaattgaggagatcgccaaagttaatcagaacgtgattgtggtaaaccagtccggtgcaccagtcgatatgccctgggccgaaaacagtaacgttaaagctattgtacaagcttggtacgcgggccaggaagcaggtcatgttatagccgacgtattacttggcaaacagaatccctctggcaaactgccacttacgtttccaattaaagtgcaggacaacccttcgtatttctactttccgggacgcgatcagaaggtggaatacaccgaaaagctgatggttggctaccgctactacgataccgaaaatgtagagacgcgctttccttttggctacggtttgagctattccacgttcagcatcggcgagccgagtctttcaaccgcggaactgaccgaaggccagacctttacagcgaacattgatgtaagcaataccagcaacgtggccggcgcggaagttgttcagttatatgtaaaacgcccggcaagcacatcgagtattaaacgccctgtaaaagaactgaaaggcttcaagaaagtccatttaggcacgggcgagaccgcaactgcaaatattacggtagacgataaaagcctgggtatttggagcaccgaagctgggaaatgggtcgtggaagctggtgattacgaagtgctgattggaacgtcgtctgtgcaagacgaacttaaaccagctggcaaaattaccgttaaggccgcttggagctggatttga

SEQ ID NO: 927 - DNA, 2556 bp, Artificial Sequence
  6xHis UPI0001ECDCBD
atgcatcatcaccatcatcatgagaatttatatttccagggctctatgggttcacgtgtggaaagcgtgcttcagagtctgacactggaagaaaaaatttcactgctggccggcaaagatttttgggaaacggttccgatacccgaaaaaggagtgcctacaattaagacgtcggatggtcctaatggcgcccgtggcgaggtgtttactggcggtacacgcgccgcgtgctttcccgccgcggtttgttccgcggctacatgggatccgacgaatgcgcgccagattgggcatgcgttagcggaggaaactaaaactaaaagcgcgcgcgtcattctggcgccaacaatgtgcaatcaccgccatccgttgggtggtcgaaattttgaaagcttttccgaagatccgtacctggcaggcaaaatggccgccaatgtggttaaaggactgcaagaaaaaggcattgccgcgacgatcaagcactttgcggcaaatgagcaggaaacggatcggctgcgcgtagacgaaatcgtgagtgagcgcgcactgcgcgaaatctacatgaaaccgtttgaaattaccattaaggaggccaaacccctagccgtgatgacgtcctataacaaaatcaacggtacgcacgccgattccaaccagtttctcttacaacaggtgctgcgtggcgaatggggttttcgtggccttgtgatgagtgattggggcggtgtgaactcaactgcggatagtcttaacgcgggccttgatctggaaatgcctggccccacccgttggcgtaaggtcgaagcggttatggaggctgtcaaaaagggggacgtcaccgaagcgactataaccgaacgcgcacgtaacgtgttaaatctgatcgaacaggtgggtgcctttgaaaatccggaaattccgccggagcagtctatcgtggatccgaaacattgcaagctgattcgttcggtggcggggcagggtatcactctgcttaaaaacgacggcgttcttccgttacgtaaagaaaacgtgaagggcaaaaagataggtctattcggcctggcgaaagaagccctgattcatggtggcgggagcgcatccttgaacgctcactatcgtattactccggaagaaggtcttaaagccgcctacggcgacgatgtggagttcaagttcgcgaaaggtgcggcaacgtaccgcttgctacctccgctgagcgaaggctgcaaagacgcaaccggtaccgatggttggactaccgagctgttcaacaaaggcaacactcttaaaccgattaaaacggcaaacggcatcaaagaagcggcgttcagtccgctggtagaacaggacgcgaaagatagtaatgttcatttcaccactaccttcactccgagcaaaagcggctcacactacttggggtgcagcggtattggccctacggtggtgcggattgatggcaaggtggtcttcgaacagacgcagaatagcccggactatatggggttcctgttcggcggaaaccctgaaaaagaatttcaagtgagtttcaccgcaggtaaacagtacaaagtgcagattcactccaaaccaccggccggagatagtgacggcagcattctgtctggcctgcctggcttccgtctgggcttcatgtatgaagacgaacacaatatggatctggttgctgaggcagtggccctggccaaagaatgtgatattgctatcgtgtttaccggccatacaccggtgtgggagactgaaggacaagatcaggtgtcatttaacctgccgcgagatggcagtcaggataaactggtggacaaagttgcgagcgccaatcctcatacgatcgtggtgaatagtaccggcgtggccgtcgcattaccctggattaacaaagtctccgcactgatccaggcgtggtttccgggtcaggaagccggcaacgcgattgcggacgtgattagcggcgccgttaatccctcgggccgactcccgatttcatggccgcgtcgcatagaagatgcccctgcttatgggaacttcccgggcgatcgcgatgaaaaaaccggtcagttaacggttcgttatgaagaaggagtcttcgtgggctatcgtcattatgatcgctttgacgcggatattgtccactttcctttcggctttggcttgtcgtatacaagcttcgcgctgggttctgccagtgtggagcagcgttcgccggggagttttgtggcaaaagtagaagtaaagaatacgggtgcggttgatggcgctgtagtcgttcagctgtacgctggtaaaaaacagaaggatctcgccaaacatcccgtgaagaccctggtagcatttaaaaaggtatttgtcagtcgcggtgcccaaggaacggtagaaatgtggtaccgcgatacggattttgcttggtttgatgaagatgcgggtatgtgggtggtggataccggcttgtacgagttctcgtttggacagtcagcaggccatattgatcaggttgttacagttgatgttaaaggttcccgtgcgctgaagatctga

SEQ ID NO: 928 - DNA, 2313 bp, Artificial Sequence
  6xHis UPI00024F2A26
atgcaccatcaccatcaccatgaaaatctgtacttccagggctcaatgacacagcaaccggatggggcaccgagctccatagccgaacaagcacgtttgacaagcggtcatgatttctggaccacggaaagtgtgggagatgtcccatcaattttgatgaccgatggcccgcatggcctgcgtaaacaggatggcccgacggatcatttgggtatttctggttcggttcctgccacgtgctttcctcctgccgtggggctggcgcagacatggagtccagccttagcgcgccgagttggagcggccattgcggatgaagcacgtgcgcagagcgtaggggtggtgttaggcccgggtgttaacctcaaacgcagcgtgagggggggccgtaactttgaatatttttctgaagatccgcatctgactgcagaactgggcggagcgtgggtgcacggcctacaggcacgaggtgtgggtgccagcctgaagcattttgctgtgaacaatcaggaaacagaccgcatgcgaattagcgccgatgttgatgaacgtacgctgcacgaactctatttacgtgcgttccgcaccattgtcacgcgccagcagccgtggaccgttatgtgttcctacaatcgcattaatggggttcatgccagtcagcatagggaactgttaaccgaaattctgcgcgaacagtggggctttggtggggcggtgattagcgattggggtgccgtggcagatcgtgtcgcggcattggcagcaggtgtagatctgacaatgcctagcccgggtccagcggcggacgcagccgtagctgaagcggtcgcgaatggccgtctcgctccggaagcgctgacgagtgcagcagttcgtgtagcagcattggcgcgtaccgccgccgcgcatgctcctcgtaccccagaaactccagatttggacgcccaccatgctttagcccgagaagtcgctggtcgtgcaatcgttctattacgcaatgatgatgatcttctgccgctgacccctaccgccgatctggccgttattggtgagctggcagcccatcctcgctaccagggcggaggtagctctcatgtacacgccactcgtgtcgacgtgccgttggaagagattcgtgctcgcgcaggggcgggcgtgggtttcgcggcaggttaccgaatcggagctgaaactgatactgatgccgccttattagaagaagccgtgagcgtggcgcgcgcagcgtccaccgtcgtgttgttcttaggcttaacggacgagcaggaatccgaaggctttgatcgcgcggatatagaactgccgcctgcccagttagcgctcgcagaagcgatcgttgcagcgaatcgtcgtactgtcatcgttttagctcatggaggcgttctgcggctaagcccgttgaccgctccagcgttgcttgatggggccctgctaggacaggccgttggtgccgcaattgccgatgtgttattcggggatgtaaacccgtcgggtcgtctcgcggaaaccgttcctgaacgtctgtcagacacacctgatcatcttagctttccgggcgaattcggccacgttatatatggcgagggcctttttatcggctaccgttggtacgatgcacgtgaattaccggtcacgttcccttttgggcacggtctgagctatactacgttcgagtatcgcgacttagaagtgcacactaccgacgacggcggcttacgtgttgcggcaaccattactaatgcgggggcacgtacaggtcgtgaagttgttcaagtttatctgggcgcagcgacgagcgcccccgccaccggtccgaccccggtgaccatgccgactcccgtgacagcaccgcgtgaactcaaagcgttcaccgatatagacctggatccgggttgttcagcgcgcgtggaaatgacggttaccgcggacgacttatcgcgctgggatttgcgcacacactcgtttgtcgtacgctcgggacgttacgcagttagtgtgggggcgtcgtcacgcgatattcgtttaacagcggaagtcgatgttgtcggcgatgataccactggtgatctgactctggaatcctccattgcagaagttctggcggaccctgttgccgccgaggctatgacgaaaatcaccgatgcgttaactgacggcgcagataccggtgaaggcatggatctcgtgaccattatgggcagtgtccctgtgggccgtattgttgattttagcgcgggtgcgctgccccgcgaagtgttacaggacattctggaccgcgcgaatgcagcccgctga

SEQ ID NO: 929 - DNA, 2298 bp, Artificial Sequence
  6xHis UPI0000E28E5D
atgcaccatcaccaccatcacgaaaacctgtacttccagggttcgatgacgttggaggagaaggcgcttctgttaagtggtaacggctcgtggactacccataaaattgatcggctgggtctgccgtcaattatgatgacggatgggccgcatggcctacgcaaagccacggggccgagcactgctgacagcgttcctgcgacatgttttccgacggcaagcgcgttagctagctcttgggatccagagctgatccgtcaggtgggcgtggcgctagcacgcgagtctcaagcaaacgatgtgcagatcctgctgggtcctggcattaacatgaaacgctccccgttaggcggacgtaattttgaatacttttcagaggatccaatccttgcaggccggctggcagcggcctacattcaaggcgttcagtctgaaggcgtgggcacctcattgaaacatttcgcagtgaataaccaggagtttgaacgcatggtgaactcctctaacctcgacgaacgcaccttgcacgaaatctacctgccggccttcgaaataagcgtgacccaggcacagccgtggagtgtgatgtgcgcgtacaacaaaattaatggcgtgtatgcaagcgaaaacccgctgctgctggaagatattctccgcaaagcgtgggggtttgaaggcttcgttgtttcggactggggcgcagtacacgaccgagcccagggcgtgatggcgggtctaaatctggagatgccgggctcaggcgatgtgaaccgaaagaagattattgaggccgtcaacgcagggaaactgccggtggcacgcttagatgaagtggtcgcgtcattagtagccgttgtgttaaaagcggcagaaagccgtcgtactggtactcggtttgacgtcgatcaacaccatgctctggcgagacaggtggcgggggagagcattattttgcttaaaaatgacgaccatatccttccgctggatgcgggtggaaaaaagaaaatcgcactcataggggcgttcgccaaagaaccgaggtaccagggcgcgggttcgtctcaggtaaacccggcgcgtatttctaatgcccatgatgaactggtagcaatcctgggaggcagcgaacgaattggatatgcgagtggctatgatttcgagggtgtaacctcggccgaactactggaggaagcccgtcaacaggcacgacatgcggatgtcgcgattgtttttgcagggttgcccgacagccatgaaagcgaaggtttcgaccgtccgaacctggacatgccggaaggccacaatcaacttattgatgcagtgtcacaggtgcaaccaaatacggtggttgtgctgatgaatggctcagcgatttcgatgccctgggttggccgtgtgaaaggtattctcgaaggctggcttaccgggcaagcgggaggaggcgccattgccgatattttgactggtaaagtgaaccctagtgcgaaacttcaggagacttttccggtccgtactgaggatacccccaccgccattgaattcccgggcctaaaccagcaggcgtattacggggagggagtgtttatcggataccgttattacgacaagaaaaaaattgcccctctgtttcctttcggctttggcctgagctacacaaccttcgactatagcgaaatgaccttgtccgcctcgtctatacaggataccggatcactgaccgtgcaggtgaaagttaagaataccggcaaagttgcgggcaaggagattgtccaactctatgtacgtgaggaggttccggccgttagccgtcccgagaaagaattgaaagcatttgcgaaggtggcactggccccgggcgaggaaaagaccgtctcctttaccctcagtccccgcgattttagctactataacgcccatttgcatcgttgggcggttaacccgggccgttttgatatcttagcgggcggcagcagccgcgacctgccactgagcaaaagtgtttctgtagaagcacaggtagccgtgtccacccttacccgcgaaagtatggttaaagaatttcgcgatcacccgaaaggcaaagccttttactcgcgtttaacatctatcattatgggggggagctcagaggaacctggtacagtaaaacgcaccctccaggaagaacgagcacgtaagaaggcggagatgtccactctggtctttgtgaatgatatgcctgcatacaaactgatcgcattcagtgaagggaaattcacggaacagatgctgaacgacattctggcgcaggttcagtga

SEQ ID NO: 930 - DNA, 2556 bp, Artificial Sequence
  6xHis UPI0003E03A52
atgcatcatcatcaccaccatgaaaacctgtacttccaaggaagcatggaaggcggcgtggacaccaaggcgatcctagataagctgactattgaagaaaaaattagcctgctggcgggagcgaatatttgggaaagcgtagcgatcccggcgaaaggtgtgcctgccttcaaaacatccgatggcccaaatggtgctcgcggtgcgaagtttggagatggtctgacgagtgcctgcttccccgcggcgtgctgtatcgcggcgacttttgaacctgaactggctttacgcgtgggtcgtgcattagcgaatgaaactaaatcaaaaggcgcccgctgcttattgggccctacgatgtgtatccaacgccatccgctgggtggccgtaactttgaaagctttagtgaagacgccttcttgacgggtaaaatggcaatcgcgatggttaaaggcatccagagtcagggtgtttcagccaccgtcaaacattttgtagctaatgaacaggaaacgtgccgcctgactgttgacactattgtgagcgaacgcgccttgcgcgagatttacctacgcccgtttgaaatggcgattaaagaagccaatccttgggcggtgatgaccagctacaacttggtcaacggtgaacatgctgatagcaatgcgcttctgttgaaacaggtcctgcgcggagaatggggctgggatggcttagttatgagtgactggggaggaaccaattcaaccgccgccgcattgattgccggcttggatctggaaatgcctggcccgacccgctggcgtcaaccagaagtcgtgatggaagccctggaactgggggcattgtctgaacaagtaataaatgatcgcgcactgcatgttcttgatttcgccaagcggctgggttgcttcgaagactcaacgatagcggaggagaaaagcatcgatcgtgcggaagaccgtgcgctcattcgtgaagcggcctcgaaggggatcgtgttgctgaaaaataaagataatacgctgccattgaccaaagaaaaactgctgggcaagaaagtggccctgttaggctacgcgaaaatgggtttggcacatggcgggggctctgccagcgttaatgcacattaccgagtaaccccgtgggatgcgttccaacgtgaattaggtgacgttgtcgaattcagctttgccaagggtgcacatacgatgcgtaacctgccgccaatcaccgagaatattacggacaatcagggtggctcaggctttacctggcgtctgtaccatccgggcaccacggaaccagtccaggtggtgcacggccacaagctgtcagaagtggatgcgctcgattcgcaacatattcccaatatggaggttattctggaagcgacttataccgcgacggagacaggcccgtgttatctgacctgctccggtctgggtccatcaaccctggcaattgatgacaggattgtgttcgagcaaaccgagaactgcaacgatggcatggcctttatctttggaggtgttcccgcggtagaaagcgtggttgaactgattgcgggtcaacaatatcgtatccgtattcacaccaaaccgccggtaaaaatacctggagttgaccttggcatcctggagggcaaaataggtgtgcgtgttgggcacatgctggcatcggaacatgacaaggatcttttaacggaagccgttaaactcgcgaaggcgaccgataccgctattgttttcaccggccatgaaccgtcatgggaaacagagggtcaggatcagctgtcgttccatttaccgaaagatggctcccaggataggctggtgtgtgccattgcggcagccaacccgaataccattgtggtgaactctacgggagtgcccgtcgctatgccttggctggaagacatcaaaggcctggtgcagacatggtatccaggccaagaggcgggaaacagcatcttcgatgtgctcaccggtacacagaacccggaaggacatctgccatgtacgttctcgaaacgccttgaagactgcccggcctttggcaacttcccgggtgagtacgatgaaaatcgccagctgactgtggaatactcggagggtgtctttgtcggttatcgtcattttgatcgtttacctcgtgacaaaatcaactttccgttcggctttgggctgagctataccgaattcacctttagcgatttctcagtgaaagagagctcaaaaggctttgtggcgactgtgaacgtgaccaatactttgagtcgtgctggaggcatcgccgtgcagatttatgtgggtaaagtaggcaatccgagcaccgatccgattaaaacccttgtcgcgtttaaaaaggtgacgatgcagcctaacgaaatggtccgcgtggatatgccgatcactaagcagagttttagtggtttcgatgaagaaacccgtcgttggatagtacgcgggggggattataaattcggcgtaagtaaaagcgcggcggatccggttctggatcagattatctacatcgagccgcagatattcgcactgtga

SEQ ID NO: 931 - DNA, 2328 bp, Artificial Sequence
  6xHis UPI0003B7B6EE
atgcatcatcatcaccatcatgaaaacctatattttcagggcagcatgacggacaatctcacaattggagttacggaagcaaatgagctgagcgtgaaggaacaggcgagcttgacttcggggcaggatgcctggcatcttcaggggataccgtctaagggtattccgggttacatgattaccgacggccctcacggtttaaggaagactaccgcgggcaatggcgatgaaatgaacctggatcgctcagtgccagcgacgtgttttccgccggctgcagggctctcttcgtcttggaatccacaactggttcgcgaagtaggcgaagcgatgggggaagaatgcgtgcaggaaaaagtggcagtcatcttaggcccgggagtgaacatcaaacggaacccgttgggcggccgcaattttgaatattggtcggaagatccttatctggcgggccatgaagcagcgggcattgtggacggtgttcaaagcaaaggcgtgggtgcttcacttaaacacttcgccgtgaacaatcaggaaactgatcggttcagggtaagtgccttagtatccgaacgcgcgctgcgggaaatctatctccctgcattcgagtacattgttaaacacagccgcccgtggaccgtgatgtgttcgtacaacaaaattaatggcgtgtatagctcagaaaatcattggctcctgacagatgtgctgcgtaaagaatggggcttcgatgggattgtaatgagcgattggggagcggaccataaccgcgtggccgcattaaatgccggactgaatttggaaatgccgccgagcggtacagatgaacaagtagtgcagggagtggaaaatggtaccctcaagagggagcagcttgaaactatggcacaagcgatgattgacctggcgcataaggccgaagacgccatgaatcaggatggctaccgctataatgtggacgatcataataacacggctcgacgcgccgcgcgagagagcatggtgctgcttaagaatgaagaacacgttctgccggtgaaagaacaagatcacatagcagttattggtgagttcgcccggacccctcgttatcaaggaagcggaagttctcgtattaacccgacacgtctgacgagttttctggatgccgcgcaggaacgcggtgttagtctgaccttcgcgccgggttatactctggatcagtcccccgccgatacacagttagaacaggaagccgtggatgcggcggcccaagctgatactgttttaatgtttatgggcctgccggattacgacgagtcagaaggattcgatcgcaccaccctcgcaatgccggcgaaacagctggaactcctgggtaaagtgacagcggccaacaaaagagttgtagtgattctgagcaacggttcggctgtaaccatgaccccgtggaacgaatcagtgcccgcaatcttggaaacgtggttattgggccaggctggtggcgttgcactggcggatattgtatttggggatgtctctcctagcggacgtctcgcccagaccattccggtcgagttaaccgatgacccgtcaacgattaactggccgggtgaagagcatcacgttaactacggggaaggagtctttgtgggctatcgttactatgatacctttcacaaacctgtagcctatccatttggctttggcctcggctatgcagattttgcgatcgatgaagtacaagtgcgagccactggtgtgcatgcagcacaggtacgtgcgaaagtgaccaatctttcccaggacactgcggcgtcccacgtcgtccaagtgtatgtgcgccccgtcgaaccgaaggtaccaggggaagcctcggagcatgtggcgcgccctgtgcatgaattgaaaggttttgcaaaggtatatctggaaccgggacagtctgatacggtcaccatcgatcttgatgaacgtgcttttgcgtattggagcgaggaattccatgattggcgaatcgaaggtggcgaatatggcattgaagtgggtagcagctcacgcgatatagcagcgacggtaccggtgactatcgccggtgatggcaaacgcaagccgctgactgtttggaatacactggacgaatggcgcaaagacccggtgggcaaggcggtggcgggagaattgatggcgaaattacgtgaacagggtgccgattttacgggcggtgacacaagcaccgaaatttttatgaataccctgccgattaatagcctgactgcattgatgggcccacaggggaaccaagtcgaagactttttactgggagaatatgcccgccgtacccagtga

SEQ ID NO: 932 - DNA, 2292 bp, Artificial Sequence
  6xHis UPI000503F283
atgcatcatcaccatcaccacgaaaatctgtacttccaggggagtatgagcgaacatacctatccgtcggtaaaagatctcacgctggaagagaaagcatcgcttacctcaggcggtgacgcctggcacctgcagggtgtcgaggcaaaaggtatacccggttacatgatcaccgatggtccccacggcttgcgcaaatctctggctaccagcaccggggagacggatttagatgactcagtgcccgcaacatgttttcctccggcggcgggtctgagtagcagctggaacccaagcctggttcgcaaggtgggtgaggcaatgggtgaagaatgtattcaggaaaaagtcgcagttatcttggggcctggcgtgaatattaaacgcaacccactgggcggccgatgcttcgaatattggagcgaagatccttacttagccggccatgaagcagtaggtattgtggaaggcgtccagagcaaaggtgtgggcaccagcctgaagcactttgccgtaaacaatcaagaaaccgatcgccttcgagttgatgcgcgcgtcagccagcgtgcattacgcgaaatctacctgccggcgtttgaacatattgtcaaaacagcccaaccgtggacgatcatgtgttcctacaaccgcgtgaatggcgttcatagtgcccagaatcgttggctgctgaccgatgtattacgtgatgaatggggttttaaaggaattgtaatgtcagattggggcgccgatcacgaccgtgtggcaagcgttaatgcgggccttaatctggaaatgccgccgtctggcacggatgatgagatcgtatatgcggcgcgcgatggtcgcattgatcctgctcaattggaccgtatggcacaaggcatgattgatcttacggataaagcacgtgccgcgatgagcatcgacggctatcgtttcgacgttgatgcacatgatgaagtggcgcatcaggccgcagtggagtcaatggttctgctgaaaaacgaagatgccatcctccccctgaaaaaggatgctaaaattgcggttattggcgagtttgcgcgcactccgcgctatcagggcggcggctccagccatattaccccgacgaaaatgacgagctttctggataccttggcggaacgtggcatcaaagcggattttgccccgggctttacacttgatctggacccggctgattcagccctagaactggaagcggtagaaactgcacgtgatgcggacgttgccttactgtttttaggtcttccggaagctgccgaatcagaaggctttgatcgcgaaaccctcgatatgcctgcaaaacaaatcgaacttctggctaaggtggccgctgtaaacccgaatgtggcagtggtgctgtctaacggttcagtggtaagcgtcgcaccttgggccggtaacgcgaaaggcattcttgagagttggttacttggccaggcaggaggacccgcgctggcggacgtaatttttggtgaagcctctccgagcggaaaattagcacagagtattccccttgatattaatgatgacccctctatgctaaactggccgggcgaagaagggcatgttgattatggagaaggagtattcgtgggataccgctactacgacacgtacgatgtggccgttgattacccatttggctacggccttagctacgcatctttcgagatttccgatgtccatgccgaaaaaaccggcgcgaacaccgcaagcgtgaccgccaccgtcgcgaatgtatcagatgtagatggtgccgaaaccgtccaggtctatgtggcgccgggaaaggcggaagttgcacgcccgagtcatgaactgaaagggtttgccaaagtgttcctcaaggcgggcgagagcaaaactgttacctttgacctggatggtcgcgcgtttgcctattggtcggagaaatatggtgactggcacattgaagcgggagcttacggtattgaggtgggtactagcagccgcgatattgcagctactgccaccgttgaattagaaggtgatgggaaatcactgccgcttgacgaatggagcacgtacggagagtgggaagctgacccggttggtgcgcgtgtggttgctgcggtagaggccgcgggggaatcaggcaccctgcccaaactgccggataacaccatgatgcgtatttttctgaaaagcatgccgatcaactctatgccgatgttaatgagcgatgggggccgacgcattactgcatttatgctggatgaatatgccaaactgacgaaatga

SEQ ID NO: 933 - DNA, 2613 bp, Artificial Sequence
  6xHis UPI00059673EE
atgcaccatcatcaccatcacgaaaacctgtattttcagggctcgatgggcgatcctcctagcgacgccgaattacgcgcgctgatctctcaactgacgttaggtgaaaagatttcaatgctgtcgggtaaaaatgtgtgggagacgtttgacgttgagcgtttaggtattccttcacttaaagtaactgatggcccgaacggcgcccgtggtggaagctttttcgatggcacgaccgcggcttgcttcccgtcttgtgtctccctagcggcaacgtttaatcgagggctggcttcccgggtgggcgcagccttgggccaagaagcggaaacaaaaggggcatacgttgttcttggtccaacggtgtgtggtcatagatctccactgggcggtagaaacttcgaagcatttagcgaggatccgctgcttagcggtgaattagccgccgagtacgtgaaaggcttgcagtcccagcgcgtgggcgccacggtaaaacatttcgttgcgaacgagcaggataccaaacgctttacagtgaatgaaaccatctccgaacgtgccctgcgcgaaatttacctgcgcccgttcgaaatcgttgttaaaagtgcggacccttggtgtatgatgacctcgtatccgaaagttaacggtcggcacgtcgatgcccaaccagccttcattaacgacatcctgcgcaaagaatggggcttccagggcctggtcatgtctgattggggcgcaacgtcggacgcggttagttctattaccaatggcttaaatctggaaatgcctggcccaccgaataggcgcaagcccgaaatagtccaaaaggcagttgatgagggcctcgtcaaggtgaacgatatcgacgaacatgtgtttagcctgctgaacctgctgcgccgcacgggcaaatttagctatcgtcgtgagccgcgtgatgaacaggcagtggtgcgtcctgaacataacgcactgattcgtgaagcaggcgcagagggaattgttctgcttaaaaattccaaaaaaacccttccgatcggcacgccgaaatctaagcgtatcgcgctactgggcccgctgacccgtcatgcagccgcgcatggcgggggctctgcgagtctgaattgtcattataaagtcaccccctatgatgcctttcagcaacgactgggccagacgtgtgagctgtcttacagcaagggtacgcatattttccgcgtgctgcccgatctggaggcgggtgcggttaatcgcaataacaatccgggctttattgccgagttttttagcaatccgaatttctccggcaaacctttttatcacgaagagtatcctcgcggcgcgtttacgactcttatgaacacgaaagttgcaggcatcgccgaaagtgtccgtttcaccacgaaatattccccccccaccagcggcaaacattatctgagttttagcggactggggccaagtaagttatttattgatggagagctagtgagcaatcaggtgaaagaaagtaaggatagcatgggctttctgctgggcgtacaggatgaacatcgcttccagtatgatttcgacagtaataagagctacgatgtggtgatcgagtcagtgccttcccaagtcaacaatagcgatttatttttactggagggacagattgccgcacacctgggttttgtggcccaggcggaaatggaagccgatctccttacggaggcggttgccctggccaaatctgcagacattgcaatctgctttgttggtaacactgctcagtgggaaaccgaaggacaggatatggcgtcaatgaccctcccagcggatggctctcaggatggattggttgccgaagtagcgaaagcaaatactaatacggtcgtggtgattaccactggtgttcctgtagaaatgccgtggctggatcaagtgtcagccgtactgcagggatggtacgcgggtcaggagattggcaacgcgattgcagatgtgctgcttggcgatgtgaatcctagcgggaaacttcccgtgtcgtggccgcgaaagtacgaacatacagcgtgctttgggcacttcggtctggattcattcgagacccaacaggtcacttatgttgaaggtgttaacgtgggctaccgtcactttgatcagctctacgaaacggaaaaggaagtgctcttcccgtttggcttcgggttgtcctacagtacctttgaaatctcaaacgcgtcgcttgaaggatcgttttctcagtcgaccgacggtccggtcgacattacagttaaaattcagaacacctcatcccgcaaaggtgccgagaccatacaaatctatcttaccgcaccgaaccgaggttccaaaggtcgcccgccgaagagtctcgtagcatttgagaaagtgagcttggagccgagcgaaaaaaaagacgtccgtctgtcttttaaaaaagatgcggcggcgtattggatcgacagcccggcggaggccggtggtcaggtgtggcgagttgaatccggtcgtcatgaagtgctgatttgcacgagcagtaacccgagtgatacccatgtgcggtgcgcgctggacatcatagaaggctttgacttcaacccgtga

SEQ ID NO: 934 - DNA, 2388 bp, Artificial Sequence
  6xHis UPI0006C069F3
atgcatcatcaccaccaccatgaaaacttgtattttcaagggagcatgaacaagaaaattaaagaaatcctgaatagcctgacgctggaagaaaaagcatcactgtgcagtggggtggggctctggcagacacgcccgctcgaagacaaaggcatcccggaaatttggatggccgacgggagtaatggcgtccgcatcatgaaacccgtgaaccaagaacgcaaacaggataccagtgactttttaaaagttacggatctgacccagaacagcccgaccattacaaatcagtacgaagccgtgtgctaccccagcggagcgagcctggcatcgacctgggatacagaactgatcgaagaaatgggcgaggccttaggtgatgagtgccgctactttaaggtgaacctgttgctcgccccgggaatcaacattaaacgcagcccgttaggaggtcgcggttatgaatattattcagaggacccgtacctgacgggcaaagtagcagagagtttcattaaaggcgtccagaaaactggtaccggcactagcatcaaacactttgcggccaataatgctgagacgcttcggattaatatgtccagcgatgtagacgaacgtgcactgcgcgaaatttatctggcgccgtttgaaatcggcgtgaaaaacgcgaagccctggacagttatgtcgtcatataacaaagtaaatggtgtgcagatggcagaaaaccgtgagctccttaccgatatactgcgtgacgagtggggcttcaacggcgtcgtcgtctctgactggggcggtgttaaggaccgcattaaagcactagaggcgggcaacgatctggatatgcctgaaaatcagcgctcgaatcagagcgttgttgatgctgtgcgccgcggcattctttccgaggcagttctggatcagagtgtcgagcgcattctggaacttgttttcaaagcaaaagagcaagagcgctttactgacgatatggattttgagagccaccgtaaccttagccgtaaagttgcagaagaaagcgtagtgctgcttaaaaacgagaaaggtctgctgccgatcacgaaagaaaaatataaaaaagtcgccgtgattggcgcgtttgcccgagagcctcgatatcaggggggtggctgtactctcgtgaaccctatccgtatttcacgcccgtatgaggagatggagaaactggccggcaaaaatattgaattgacctacgcaaaaggctatgagctgaaggatgaaacatctgacgaactgattcatgaggcggaggaagcagcgcgtgaagcagatattgcggtcatcttcggcggcctttgggtggcgtatgatcgtgagggctttgatcgtaaacacctggagatcgactctagccatattcgtctcattgaagcggtttccagagtgcaaaaacgtgtggttgtggtgctgtccaatggtgatgccgttgtcatgagcccttggttagatcatgtaggggctgtggtggaacagtttttagtaggtgagacggtgggcgaagcgctggcccgcgttctttttggcgaagtgaatccgtccggcaagctgccggtcaccttccccaaacgccttgaggacacatctgcgtatccgtactttccgggcgaatgttctcatcatgtttatggggagggcatttttgttggttatcgctatttcgacaaaaagaaaatcgaacccttgtttccgtttgggtatggtatcagctataccacctttcagtatagtgccattcgtgcggatcgttctcaaatgaaagacaccgatactgttaccgtgtcggtggatgtcacgaatactggttgcgtgaagggtaaagagatcgtgcagatctacgtctcggatgaaaaaagccgcctcaagcgccctgaaaaggaactgaaagcctttggtaaggtggagcttgaaccgggtgaaactaaaacgctgacgttcactttaggttatcgtgactttgcatattatgatccggaggcgagcgattgggtagttgaagaaggcatcttccacattcatgccgccgccaacgccggagatattcgccagtcaatcccggtagaggtaaccgaagcgaaaaagaagtttcgacgtctgtatttggactcacagcacacagcagtatttgagcatccgatggccaaaaaaatgtacctggatttcctggtagaaacgggcgtaattgcagctgaccgcgtggaagcgatggcaccgctgttgaaaggcaattacatgggcatctataatgtggttactagtctcctgggtggtaacgtgaccaaagaagaaatgcaggccgtcctggatcgcataaatgaggtttgtaaagacaatcgcccggctgaatga

SEQ ID NO: 935 - DNA, 2280 bp, Artificial Sequence
  6xHis UPI00097EB800
atgcaccaccaccatcaccatgaaaacctgtactttcagggatccatgaccacaccacgtccgagcctggaacagaaagcggcactgaccagcggtcgagatacgtggcattctgaaagtttggatgacattcccgtgatgatgatgaccgatggtcctcacggcctgcggcagcaattacaggatggcggcgatgcgttaggaattggtaattcggttcctgcgacctgcttcccgccggcagccgggttagcgagcagctggaatacaggccttgtagaaagggtaggcgttgcactgggcacagaagcgcgtgcaaccgaaattcgcatcctgctgggcccgggtctgaatattaagcgtagccctctggggggccgaaattttgagtacttcagtgaagatccgcgcgtttctggcgaacttgccgccgcaatggttacgggaatccagagcatgggcgtagcagcaaccccgaaacatttcgcggttaataatcaagaaaccgatcgtctgcgagttagtgcggaagttgacgagagagctttacgtgagatttacctgtctgccttcgaacgcgtggtgactgtagcgagcccgtgggcgttcatgagttcatataaccgcatcaacggcgtgtacgcgtctgagaaccattggctattaacggaactgctccgtgaagaatggggcttcgatggtttagtcatgagcgattggggcgcggtgaatgatcgtgtggcggcgctagccgcaggtctggaactggaaatgcctccgactggtaccgatcagcttattgtggacgcagtacgcaccggcgaattggatgaggcagtgcttgatcgtgcggtggatcgcctgaggttactggccgagcgtactgagcgtccgcctctgaccggttatgacgctgatgcgcacgatgatctggctaggtctgccgcccaagaaagtatcgttcttctgaaaaatgctgatgtcctgcccctggatgccgcggccactccgcgtattgcggtagtgggtgaatttgctcgaaccccacgctatcaaggcggtggttcgtctcgagtagtgccgacgcgcatgcattcagcgctggatgcgttaaccgacgccctgggattgggcgcagatggattgagcttctctccaggcttcgcgctggacggggacaccccggctggtgctgccgacgaagcagtggctgcagttgaagccgctgatgtggccgtgcttttcctgggcctgcctgacggtacggaatctgaaggtttcgatcgtacaacaattgcactgccggccgaacagctgcatctgctggaacgcgccgcagcgacgactactcctgttgtggtagtgctgagcaacggagccgtggttgatgtggcgtcctgggaacatcatgccgatgcaatcctggaagcgtggctgctggggcaagctggtggtctagccattgcagatgtgttactgggaaccgtatccccgtcaggtaaactcgcggagaccattcctctcgatctggcggataccccgtctcatttgtcgtttccgggccgcgatggtgtagtagtgtatggtgaatccgtgtacgtaggttacaggcactatgatacgcgccgactgccggtagcgtatccctttggctttggcctgtcttatacccgctttgaatatagtgaactggaagttacggcaactggtcgcaattcctggaccgtcgccgctaccgtgactaatgtaggagaacgtcgaggtgcggaaaccgtccagttatacattggcgtagaacaagaccgccctgaccgtccggtccatgaactgcgtggatttgcgaaagtggatctggaaccgggtgaaagtgcacgtgtcgaactgcctgtgactgaacgcgacctgtcccattggagcgttcgtgatggggcgtggcgagtcgagaaaggccgctatacggtagaattggcggcacactcgcgggacgttcgcctggcgacaaccataacctcagaaggcgacggcgtggttactcgtttaaacgggatgtccaccgtaggtgaatggcttgatcacccctacggccgtgaacaaattcagtggttcattgatggcgttgacacgcggtttggcgcgactgcgccggagatgattgtaatgctcaaacagttacctattgccaaactgactacgtttggtattggactggactctgcccgcattgaaaggatgtgcgcagaagccgcagccgatggcgaacgccacggtgaacaaccatga

SEQ ID NO: 936 - DNA, 2190 bp, Artificial Sequence
  6xHis UPI0009ABD7B3
atgcatcaccatcaccatcacgagaatttatattttcagggctcgatgaacctgcaagacaaagcaagcctgctgagcggccgggatttttggagcacgaagccggttggtgatgttccagcggcagtgctgtctgacggcccacatggggtacgccgccaaacaggggaagccgaccatgttggaatccacgaatcccttccggccacctgttttccgccggccgttgccgtgggttcttcttgggatcctgcagtggcaggtcgtttggctgcggcggtcgcggttgaggcgcgtgcactagatgtgcagataaatctgggccctggtgtgaatataaaacgctcgccactgtgcggccgtaacttcgaatattatagcgaagatccactgctgaccggcgtcctggccgcggctcatgttgaagccctgcaagcaggtggtgtgggtgcctccgtcaaacattttgccgccaataatcaggagaccggccgcatgcgcgtgagcgcggaaattgatgaacgtactctgcgcgagatttatttaccggcgttcgagcgtgttgttaagcatgcccgccctgcgaccgttatggcagcgtataataaagtgaatggcgtctatgcgtctcaacatccctggttactgacccgcgttcttcgtgaggaatggggcttcgatggtgtcgtcgtttcagattggggcgctgtaaatgatcgcgtggcagcacttaaagccggactggatttagaaatgccgggtaatccggcaaacgacgctatgattgtacaggcggtgcgtgatggggaattagatgaagcagtggtagatcgcagcgtcgccagggtgcgggcaatggttcgcgcctggcgcccagaaccggcagcgttcgacgcggacgcccatcatgccttagctagggaactcgccgcggaatgtgccgtgcttctgaaaaacgacggcgatactttgccgattcgcgccgatgtacaaactattgcggtcctaggcccctttgccaccgaaccgcgctttcaaggcggcggaagttcccatgttacgcccacccgcgtcgactctcctctggaagagattcgacgtctggcgggggatcgcgttgtcacagcggatccagatgatgcagatctggccattgtttttgccgggccagccgacttggatgagagtgaaggctatgatcgtgcgggattagacttaccggcagagcaggttgaattgatcagggccacagcagcggctgcacgtcgcactgttgtggtgctatcaaatggaggtgtagtatcccttgaagggtggcacgacgaggtcgatgccatcctggaaggctggctgctgggccaagcaggaggtggcgcgattgccgatcttttattcggagttgccgcgcctagtggtcgtttagcggagaccattccgatgcgtctgcaggataccgcatcgtacctaaattttccgggtgaacaggatgtggttcgctacggcgaaggtgttatggtggggtatcgctaccatgaaaccgcaggacgtccggtgcgttacccgtttggtcacggattaacctatacaacttttgcagttagcgacttaactgtccgcgtaaccggtgacgattctgcccgagtaagtgtgaccgttgccaatacgggccgaaggtacggcaagcacgttgtgcagttatacgtggcgacccaagcgggtcccgtgcgtcgccccgcccgcgaactgcgggccttcaccaaagttggcctggaaccgggtcgcagcacgaccgtaacgtttgatctggatgcgcgagcgtttgcctattgggatgttaaagaaggccgatggttggtagcacctggggattacacagtgcaaattggtgagaatgcgagtgcggtggttgcggaagaaaccattgaactggcaggtgaagtaatcgcccgagaactgaccttagattcgtccgtaggcgaatggtttgctcatcctcaggtgggtccggttctcatgcgtcacgtagcagcgacgatgaccgaggaacagcgggcagcagccgcggagcaccaggatctgctgcgcatgatcgagagcttaccgatgcatcaattcctgagccctatgggtgtgcgtctcccagatcaggctgtgcgtgaaatgatggaactgtcccgtcgcccgcaatga

SEQ ID NO: 937 - DNA, 2595 bp, Artificial Sequence
  6xHis UPI000E391DF6
atgcaccatcaccatcaccacgaaaacctgtattttcagggctcgatggggtcctttctaccggaaggctcggtcgtggaagcgctgttagatcagctgaccttagaagaaaaagtgtcgctgctggccggtgcaaacatttgggagacagttcccgtgaaacgtctaaatgtaccaagcctgaaagtaaccgatggcccaaacggtgcacgcggtgggagcttttttgatggcacgagtgccgcatgttttccggcatgtgtgtccttagccgctacgtttaacccgtcgattgcagaacgtgtcggccaagcactgggacaagagagcattactaagggtgcctatgtactgctcggaccgaccgtgtgtaaccatcgttccccgctgggcggtcgtaactttgaagcattttcagaagatcctgtactgtccggcatcctggcgtcgcgctacgtacaaggcttacagggcgaacgcgttggcgcgaccattaaacattatctgggtaatgagcaggacacccgccgtttttcggttaatgaaatcatctctgagcgcgcactccgtgagatttacttaaagccctttgaaatggtggtgaaagatgctgacccgtggtgtctgatgaccagctacccgaaaatcaacggcaagcatgtggacacaaataaaatgtttttgcaggacattctccgcgaccagtggggctacgaaggtctcattatgagcgactggggggccactacaagcaccattgaaagcatcaacgcgggcctggatttagaaatgccgggtgaaacacgttggcgatccttccccgtagtaaaaaaagcgatcgagcggggcgagattaagccggagaccattgacgaacgcgcccgtagcgttctcaaacttttagagcgcacgggcaaattcaccgatcgaaaagaaacaccggaagaacaggcgattgaccttccagaacaccgcgccttgatccgcgctgcgggttcagaaggtattgtgctgcttaaaaatgcctctaacgtcctgccggttgatattaagaaatgtaagaagattgccctcctgggtcccctggcaaaatatgccgcagcgcatgggggcggcagcgcgagcctgaatgcccattataaagtcacgccgttcgaagccttcacatcgcgcgttggtgaaaacgtggaaattacccacagcaaaggcgctcatatttttcgtgtttacccggacctagaagaaggcacgaagaatctggacggtcaagcgggcttcaccgcacagtattggaagaacgaggcatttgaaggcgaaccgtttcacaccaactcgttcccacgcggatcgtttaccaccctcatggatactgcagtcgatggtaaaaaggccgtgcgtttcactaccatctactcacctccggtaagtggcaaccattacctgagctactccactatgggcccgagcaaactatttattgatgacagcctgcaggcggaacagaaactgcccaccaaagatagcatgaacttcctgttaggcgttcaggaggaaatccgttttcagttcagttttgaatttggcaaatgctatcgcattcagatagaaaccctggcgcccaccgaacctaacggagaactgtatctgatggatggccagctgtcagcccacctggggtttatttcccaacaggaaatggaagtggatgtgctggcggaagcggtgagccttgcgaaggatgcggattacgcggttgtgtttgtggggaacaacatgcagtgggaaacagaaggccaagatatggaggatatgaatctacctgcggatggcagccaggatcgtctgattagcgcggtggctaaagcgaatcctaacaccattgttgtgaatacgacgggtgttgcggtaaccctgccctggttagacgacgtcccggtttttatgcaggcctggtatgccggccaggaaacgggcaattcaattcttgatgtgattttgggtaacatcaatccgagcggtaagctgccgatttcgtggccacgtcggtatgaagatacggcggtttacggcaacttcggtctggatagctacgattcgcgtcgcgtggagtacgtggaagacgtgtatgtgggttatcgccattttgaccgttattatggtaccgatcgtgaagttctgttcccgttcggatacgggttgtcttataccacgttcaatctgagcgatcccaaactggagggtaaaattgaggtgggcacagatgatggcataagtatcagcggtaccctgacaaacctgggttcgattgcgggtgcggaggtggttcaagcgtatctgcttccaccgagcacttcaactgatcgtcctgttaagggtctcgtggggtttgcgaaactggtggttgagtcaggtgaaaaacgacggttcgaaatttcgtttaaaaaagacaaagttgccttttgggatacgtccaaaggccaatggagtgttgacggaggcaattacactatttggctcagcacttcgagcagcccggcggacaaacaagcggagctggacttcgcgattccggagcctttttctttcggcccgtga

SEQ ID NO: 938 - DNA, 2541 bp, Artificial Sequence
  6xHis UPI0000EC83AE
atgcaccatcatcaccatcacgagaacctctactttcagggcagtatgaacccgaccctgtcggcggccgttactgccccgagcgcgggcacccaggatgcggaagccgagattcgcgatctggcgcagagcctgactctggaacagcaggtgcagttattaaccggggcagatgtgtggtcgacgcatgccattcctgaaattggtttgagtcgtgtcgtaatgagcgatggtccggcgggcgttcgtggggaagacttcgatgagcgccacgattctgtaagcctcccatcaagctcggcgttatcagccacctggagtgtcgaaaccgctcgtaactacggccaagtgctgggccaggaagcacgtcgtaaaggtgtccatgcagtcttgggtccgaccattaacttacaccggagccctctgggaggtcgtcactttgaatgtatgagcgaggatccacgcctgaccgcgactatggcagcgggctatgttgccggcgtacaatctatgggggtaggggccacacctaaacattatctggcaaatgaggccgaaacggaacgattcaccgcggacagcgtcgtggatgaacgtccgctgcgtgaactttacttagcggcgttcgaagacgcaattacagaagcgcgtgcatggctcgtcatgtcaagttacaattcgatcaatggaactactgcgtcagagaataaactgcttgaaacaccgctgtccaccgaatggggttttgatggagtagtggtaagcgattggactggtgtgcgcagcattgacgcggcgaacgcgcatcaggatttagagatgccgggacctgttggccattggggtcctaagctgctggcggcagttaatgaaggtcgcgtgagccgcgaggctattttagagaaagtcacccggatattgcgcctcgccgcccgtgtcggttctctggaaggcttcgaacctgccgtgacacacttgccgacagaactgaatggcgccgcggtagcacgtgaagttgccgtgcgcggggcggtccttgtgcgaaataaaggcctgctgcctttagatgcgaaagctctgggtagcgtggccgtgatcggccataatgcggatgaagcgcgtacacaaggtggcggctccgccacggtaatgcccaagtacaccgtgtcgccattagaaggcctgcgtaaagccttgcctgagggtgtgaaagtgacctacgctcgtggcgcgaaagtagcggaagggattcaggcgtttccgcgtaccagcctccataatccggtgtcaaatgttccgggaattcgcgttaccttccttgcagaagatggcacagaaatttccggagaagatcgcctggcgtctcacctgatctggtttggcattgggattccggacggtgccgcctctattcgcatggaagccgactggaccgccgagaccgcgggcgttcatcatctcggagtgggcacagttggccgtattcgctttgtactcgatggaaccgaagtgtttaacagtgaactggaggatgatacggaggtactcggcgcggcattatttgatccgccgaaaactgttcatgcgattgataccaccgccggtcagagcatccggatcgaggcggagtatcagctgccgaaagaacaagtaattccgtttaccgccattctgctaggagaagagaccgtagtggcagaacctcaggcggaaattgatgcagcagtggaagcagcccgtgcctcggatgtcgcagttgttgtcgttggtacgaatgcggccattgaaagcgagggctttgatcgcaaagatctggatttgcctggctaccagaaccagctagtcaaagcagtagccgctgctaatcctcgtaccgttgtggtggttaatagtggctcaccggtactgatgccctggttagacactgttgatgctgtgttgctcggctggttcggtggtcaagagttcggtagtgccgtagcagatatccttctgggcgtggaagaaccgggtggtcgtcttccgacgacctggccaagcgcattagatgacgttcctgtcttgaatacgactccgaccgatggtaaagtggtttactcggaaggcattcatattggctaccgcgcgtggcttaagcagcaagcagagggtggtgcggccccggcgttgccgttcggctttggcttgggttacactacctttgaatttggcaaagcccatgccccgcaggccgtaaccgcgggtaaggatttggtggttcatgtgcctgtaaaaaacaccgggacgcgcaccggccgtgaagtagtgcaggtgtatgtcgaacgcaccgagagtgcggttgaacggcctgtacgttggttagcagggtatgccggcgcgcatttggcgccggctgggactgaatctgttgaaatcaggattcctgccaaggcgttcgcgcattatgacggcggctggcagttcgaacaaggaacgtttcgtctgcttgtgggccgccatgcggccgatgattttcaatcactggatattgaactgcgttga

SEQ ID NO: 939 - DNA, 2514 bp, Artificial Sequence
  6xHis UPI0001F21F08
atgcatcaccatcaccaccatgaaaatctgtattttcaaggtagcatgacccagctctcaatgccgagcagcctgacgacccctgcctcggggactgatcaccgtgtgctggatctggagcgcaaagcccgtttagtctcagggggggataccttccggacgtcgccagaaccggcactgggtctgttcccaattgtgtgctcagacggtccggttggtgtccgcggtgaacgctgggatgaagcagataccgccctgttgctgccgtgtgcgaccgcgctcgccgcaagctgggacgaagagctggtggctcgcatgggcggccttcttgcagccgaagcccgccgtaaaggtgttcatgtggtgctggccccgacattgaacctgcaccgcagccctttgggcggacgcaactttgaatgcttttctgaggacccgctgctaaccgcacgaattggtgccgcctacattggcggtgtacaggcgctgggcgtggccgctaccgccaaacattatgtggccaacgacagcgagacggaaaggcttaccgtcgacgcacgtgtagatgaacgtacgttgcgtgaagtgtatctggcaccttttgaagcggctgtgcgtgcgggagtttgggctgtgatgagtgcatataaccgtgtcaatggcaccagcatggtcgaacatcccctgttagcggaacctctgaaaggagaatggggcttcgacggactggttgtttcggattggggcagcgtacgtgaagccgatggtcctggagcagcggcttgcgatctgagtatgccaggaccgaatccggcgtggggtccggcacttgcagcagcggttcgagctggtcgtgttcctgctgccgccctcgatgataaagtggaacgccttcttcgcctggcgggccgcgttggagcctttgacccgcctcccgcaggtcgtgcgcctgtgccagcagatccggccacccgtggagccctccgtgctgccgcggtcgcgggtaccgttctcttgcacaatccggaccgcctcttacctttagacgagcctgcgctacgtcgagtggcggtgcttggccccaacgcagcaactgctcgtgtccaaggaggtggatcggcttctgtttttccagcagccccagtgtcaccactgaacggtcttcgcgccgcgttagatccgagcgttgaagttacccatgcccccggtgtgcgcacggaactgcgtcccaccccgttagcggcagccgattgtgtgttgccggatggcagtggcccgggggtgttagttcgctacctagccgccgatggaagcccattacacaccgaagcgcgggcaacgggccgtgtattggaaccatccgcagatgtggatttgaccgcggttcgtaccatagaagtggcgtcgcgcttcactgccccgagcgctggacgttggcgtttaggtgtggtcggcctgggggcactgcgcttagaagcggatggcgcggtactgttagatgaatacgtcgccccgctgtcggacgatccgacctatctgcatgtagctccgtcatttcggcaggtggagcttgagctggcggccggtcaaggcgttgacttactggcccgccgaacggtggaacctgaacacggacgtgtactggtcctcgcggcggatcgccctgcagctgaattagaacgtgagtttgcccatgctgttgagctcgcagcagctgccgatgtcgcagtagtggtggttggtaccaccgatgaacatgaatcagaaggctttgatcgggcaggcttacgtttgccgggccgacaagacgaactagtggaagcggtggcggcggtaaatccgcgcaccgtggtcgtggtaaacacagggagccctgttcttctgccgtggcgtgagcgggtgggcgcggtgctgacatgttggttcccgggtcaggaaggtggtggcgctttagctgaagttttacttggtcgtgccgaacccggcggtcgcctgccaaccacctggcctgatgcagaggccgattgccctgtgtatgcgactgctccgagtggtggccgacttgcgtacgcggaaggcccacatttgggacatcgcggctggcttcgtgccggtcgtacgcctgcctactggtttggtcatggacttggttggggcgagtggtgttatcttgctctgggcgaacctagtgcacccgcggccgacggctcacgcacggtgcgtgtggcgttacggaacgatggccctcgacgctctcgggaaaccgtgcagttataccttagccgtccggacagtgaacttgatcgtcccgttcgttggttggccggcttcggcgcagtggaagccgggccgggcgaacgcgtggaggtagaattacgactacctcagcgtgccctccaacattggtcggtagaggatcgcgcgtggcgtactgagcccggtacattcgtcttacacgttggcccacactcaggcgaactgcccttggccgcagcactgcctgttggagcgtga

SEQ ID NO: 940 - DNA, 2007 bp, Artificial Sequence
  6xHis UPI00027E251E
atgcaccatcatcatcatcatgagaatctgtatttccagggatcaatgggcgtggacgtcgtcctgggtcccggcatgaacattaagcgtagcccactgtgtggccgtaactttgagtatgtttcagaagacccgcatgtgactgcccgcattgcagcggccttagttgagggtatccagtcagagggcgtcggggcatgcgttaagcactttgcggcaaacaatcaggagaccgaccgtatgcgtagctcaagtgacgtggatgaacgtacgcttcgcgaaatttatctgtcggcgtttgaagaagtggtgcgtactacggccccggcgatggtgatgtgcagctacaatcgactgaatggtgtgtatactagtcaggatccgtggcttttaaccacagtgttacgagaagagtgggggtttgatggtgtagtcgtcagcgactggggagcggtagttgatcgcgtggaagcagtacgtgccggtttagatctcgaaatgcccccctctggcactgatcgtcgcattgtggatgctgttgtggaagggcgtcttgaagaatcaattttggatacggtggttgaacgactgcgtgggttacaggaacgcgtaagttcagatactagccgccctcctgaacacgaagcacatcgcgaattggcacgagaagcagcgcgtgaagcgctggttttacttcgcaatgaaaatggtgcgttgccgttagaacccggcctgagcatcgccgtcgtgggagaattcgctcgtaccccgcgctatcagggtggtggttccagtcatgtagtccctacccgcgttaccgatgcactagctgcctttcgtgaggcactgccggaggaagctgtgcgctttgcaccgggatttacactcgatggcacggatgcgccgggcttggccgatgaagcggtggcgttagcggaagaaaccgatgtcgccgtccttttcctcggcttgccggaaagcctcgaaagcgagggctttgatagaacggatatcgatctgcctgcggagcaactggctctcttagcccgggtacgccgtgtatcagagcgcgtcgtcgttgtactggcaaatggaggggtggtttctgtcgcagattggcgtgacgatgccgacgccgtacttgaaggttggttaccgggtcaggaaggcggtgccgcagtagtagatgttttaacgggcgcagtatcgccgagtggtcgtctaactgaaaccgttccgctgcgtctgagcgatcaccctagttacttaaacttcccgggcgaacacggccacgttcgctatggtgaaggcgtatttgttggctatcgttactttgacaccttagatcgtccagtggcccatccttttggtcatggtctgacttatacgacgttcgcgtatagtgacttagaagttaccgaaacgggtggtgacgcttggacggtcgcatttaccgtggccaataccgggggtcgagccggccaggaggtagcgcagatgtatgtgggcttgccccagtctcatccgacccgtccggtacgtgaacttcgtgggtttgccaaaaccgcactagaaccaggtgaatcggtacgtgttgagctgccgttgaccggtcgtgatttatcaacatgggacccggagcatggccgctggagtctggcagccggtacttataccgtgtccgttggtgcaagcagtcgtgatatccgcctcactggggaagcggttaccagcggggatcgtttcgcacctgcgcttacccgacgtagtaccctgaaagaatggtcctcacatccgattggcggccctgtcctagccgaaatccgtgcgggcatggaaggcttagatgcagtccctgaagagttgatgcgcatggcggatagtctgccgattgtcgcactggcgacctttggggaaggtgtgactgaagaaatggtggatctgctggttgcagatgtggagacacgccgtctcgcggcgattgaacgcggagaaatcactggttga

SEQ ID NO: 941 - DNA, 2325 bp, Artificial Sequence
  6xHis UPI0000DBA338
atgcaccatcaccatcatcatgagaacctgtattttcagggttcgatggatacacgcagctcagcgtcaaccgcgctgacgacggaggaaaaagcgagtctgaccagcggagagaatttctgggagaccaaagcgctggatcgcgtgggtgtacctagtatctatattacggatggcccacatggcgtacgtaagcaaaccgggggaggtgatcatctgggaattggcgatagcgtgccggcaacaggcttcccaccggcggtggcgcttggcagcacttgggatccggatttgttggaaaccgtgggtcgtgcgttaggcgacgaagcgaaagccgaaggcgttggtgtgctgttaggtccgggtattaacattaaacgttcaccactatgcgggcgtaacttcgaatacctgagtgaagatccgatactgtcaggtcgcttaggcgccgccctggttgatggtctgcagggacgaggcattggtgcgagcctgaaacactttgccgccaataatcaggaaaccgatcgtctaagagtgagcgcagacattgatgcgcggcccttgtgcgaaatttatctgcgggggtttcgtcatgttgtggaacacgccgcaccgtggacggtcatgtgttcatataaccgtatcaacggggtttacgcatctgaaaaccgttggctcttaaccgatgttctgcgcggtgagtggggctttgatggactagttgtgtcggattggggtgcggtgtcaaatcgtgtggcggcgcttagcgcaggcctggatctcgaaatgccgtcaaccaatggggtgaccgatgcgcagattgtcgccgccgtagagtcaggtgcgcttgcacaaagcgcgctcgacacagccgctgaacgtgtgctggcgttagtcgagaaggtgcggtctaatttcgatccctctgccgactacgatcgcgatgcccatcatgccctggcccgcgatgtggccggtcgtagcgtcgtccttctgaaaaatgatggcatcctacctcttgatcccgcggcgaacacccgcattgcggtgattggtgaatttgcgcgcaccccccgttatcagggtgcaggtagcagtcaggttgttccgactcgcctggataatgcgttggacgaaattcgtacaattgcggtcggccccgaaattacctttgccccaggatactccctggacgaaagcggatctgccacgggtctgttggtggatgaagcggttagccttgcagcgtcagcggatgtagccgtggttttccttggcttaccggccgaagatgaatcagaaggtttcgaccgggaacacattgaactgccggcggcccagacagagctgcttgatgcagttctcgctgccaatcctcgcgttgttgtggtcctgtccaatggttcagtggttcgtttatcaggtcgtgccggtcgagttcccgcgattgtcgaagggtggctgttgggccaggctggaggtggggccgtggccgatgtattatcgggtgttgtgaatccgtctggccgactggcggaaacgattccggtacgtctggaagacaccccggcataccttgatttcccgggtgaagccggccatgtgcgctacggtgaagggctcttcgtgggctatcgttattatgacagccgtgacgtagccgtgagctttccgtttggtcacggactgtcatataccagctttgattactcagcgccgaccgctactcgcaccgcagcgggcgtcgaagtagctctaacggtcaccaataccggtccgcgtgacggtcgcgaagttgtccaagtttatgttggcgtgcctggtagtgccgtcgcacgtccggtgcgtgaactgaaaggctttgcgaatgtggatatcgcggccggtgcttcggaatgtgtacgtattcctattcctttcgaagacttggcgtactttgatgctgcgctgtcccgttgggttgtagaagggggtgactaccgtgtttgggtgggcgccagcagtcgcgatctgcgaggtgaagtagtagtgaccgtggaaggggacgcgccgcttccggtgttaaccgcagaatccactattggcgaatggttagcgcacccggtgggcagcgaaatcttaggggccgcactggcgcaaacagccggttcaggggtgtttgacgatccgtctctattgcgtatggcggccagtatgccgttaaaccgcgttgccgcatttccaggcagcccaattggcaccgagcagctggatgcactggtgcgccgtgcagaacgtcctccacgtgttatgaccgatcatgctcgaggtggtcggagctga

SEQ ID NO: 942 - DNA, 2493 bp, Artificial Sequence
  6xHis UPI0003EC942D
atgcatcaccatcatcaccacgagaatctgtactttcaagggagtatgacgctggaagaaaaagtaagcatggtggcaggcgccgatgcgtggcatagcacaggcgtagagcgcctgggcattccggcaattaaggttactgatggtcctaacggggcacgcggcggcgactttggcggtggcgttgggagcgcatgttttccagtgggtgtttgtttaggtagcacctggaacaccgcgctgattgaaagagtagggcaagccctgggacaggaagtgcagagtaaacaggcccatattttgctggccccaaccgtcaatatccatcgtagccctctgaatggtcgtaactttgaatgctacagtgaagatccgtaccttaccgcgcgcattgcggcggcatacatcaccggcgtgcaaaagcaaggtgtgggtgcgtgtatcaagcatttcgtatgcaacgatagcgaattcgagcgccacagcatctccagcgaagtcggagaacgcgctctgcgcgaaatctacctgcccccgtctgaaacggctgtacgcgaggccggcgtttgggcagttatgagcgcgtataataagctcaacggaacgtattgcagcgagaacccctataccttactcgaaattctgaagggcgaatggggttttgaaggtatcgtgatctctgattggggtggtacgtatagtacggtggaagctgccgcgaatggtttagatctggaaatgccgggtcctgcccgttggatgggcgaaaaactccttcaagctatgcgggacggccaagttagcggcccgaagaaactgggtgaagcagtcgatgacaaagttcgtcgcttactgtggaccatagaaaaagcgggcgcgcagctgggcccggaaccgccggaacaggcgattgaccgccctgaacatcgtgcactgattcgccaggcagccggggaaggcattgtgttgctgaaaaatgatggcgttctgccgctggatggtgctcgtgttaaacggatcgcagtgattggccctaacgcggcagaggcaaaaattatgggcgggggttcggcgcaggttaaggcgcattatgccgtgagtcccctcgacggtattcgagcacgtgctggagaggcggtggacgtgcagtgtgctctaggttgcacgaactatagagaaattcctgaattaaaaaccgaatggctgacgcctgtagggggtggtgaaagcggttggactgttgcctactacaacaatctggatctggcaggtgacccggtgcgtgcagagacaactgatcgaacccgtatgatgtggtttggccaggtggcgccgggagtagatcgtgagtgttttagcgcgcgtttatcgggcaccctcaccgtcccacagtcaggtacctacactctgtccctgaacagtgccggggtgtcgcgtatcgcgattgatggagaactggtgttggataactggactgattaccgtccgtcgcgcggtccctttgatcgggatcgtaaagtgcccacagcagaagtggaattgactgcaggccaaggctacacatttgtcgttgaatactcaaagcaacagagcccccgatttgcaatgttacgggtaggttgcttgccggcgcaacccgctgacttaatggaaagagccgtacaggccgcggctaaggcggatgtggcattagttttcattggtacttcaggcgagtgggagagtgaaggattcgatcgtccggatatggaactaccgggacgccaggtcgaactgttagaagccgtggcagcagcaaacccgaatacagtagcggtgttaaataccggctctcccgtatcggtgcgctggttagataaagtggccgcactggtagaggcttggtttcccggccaagagtgcgggaacgcaattgcagacgtgttatttggtgatgtgaatcccagcggccgtcttagtcagacatggccggttcgcctgcaggataatcctgcctatatcaattatccgggggaaaacggtcgtgttctgtatggcgaaggtttatttgtgggctatcgctactacgaaaagaaacaaattgaaccgcgttttccgtttggtcatggattaagctatacgaccttcgaatacggcgccctccgtctccaaagcgaatacacgctgggggaaccgattgccgtcagcgttgatgtaaccaacacagggccggtggccggccaggaagttgtgcagctgtacgttcgcgatgaagagtcgagcctcgtgcgcccggaaaaagagttaaaagcatttgccaaacttgcgttagaacccggggaaacccaaacggtcaccctgaccctggacgaaagagcgctcagcttttatgatgatgctaaagccggctgggtggcggaagcgggagaattcaccgtgctggtcggtgcgtcgtctcgggatatccgctgcaccgcccgtttcaccttgacagtcccgccggatcgatcttga

SEQ ID NO: 943 - DNA, 2292 bp, Artificial Sequence
  6xHis UPI0005084B63
atgcatcaccatcaccaccatgagaatctttactttcaaggatctatgagcgacaatacttatccgagcgtgaatgatctgacactggaggaagaagcgtctctgacgtcgggcggtgacgcgtggcatctgcagggtgtcgaggcgaaaggcatccctggctacatgattacggatggtccgcacggactgcgtaaatcgttagcgtcgaataccggcgagacggatctgaacgacagcgtacctgccacttgtttcccgcctgctgcgggtctgtcttcgagttggaatccagaactgattcgtcaggttggcgaggcaatgggcgaggaatgtattcaagaaaaagtggctgtcattctcggacccggtgtcaacattaaacgcaaccctctggggggacgttgctttgagtattggagcgaagacccgtacctagccggccatgaagccgtgggcattgttgcaggcgtacagagcaaaggagtaggtaccagccttaagcattttgccgcaaacaatcaggaaactgatcggctccgcgtgtcagctaatatttcacagcgcgcactccgggagatctactttcctgccttcgagcatattgtgaaaacggcgcaaccttggaccatcatgtgttcgtataaccgtattaacggtgtacattcggcccaaaaccgttggctgttgacagatgtcctgcgcgacgaatggggctttgaaggtattgttatgagtgactggggtgcagatcatgaccgtgttgcgagtctcaacgccggcctgaacttagaaatgcctccgacctatactgatgaccaaattgtatacgcagcgagggacggacgtatccaaccagaacagctcgatcgcatggcccagggtatgatcgatctggttaataaaacccgggcggcaatgtcggtagaagactaccgttttgatgtcgacgcacacaatgagatagctcgccgcgccgcagtagaaagcatggttctcttgaaaaatgatgacgcaattctgcccgttagccgcgatgcgaaaattgcagtaatcggtgagttcgcccgcaccccgcgctatcagggcggcggctcgtcccatattacacctaccaaaatgaccggtttcttagatgcattagccgaacgcggcgtgccggtagattttgccccaggtttcaccttagatcttgaaccaacggatccggctctggaagcggaagccgtaattgcggcccgtgacgcggatgttgtattaatgtttcttggtctgccagaagccgcggaatctgagggcttcgatcgcgatactttggacattccggcgaaacaaattgaactgctgaaagcggtggccgcagagaataaaaacgtggtagtgattttgtcgaatggcagcgttgtcagtgtggctccgtgggccaataatgccaaaggtatcttagagagctggctgcttggacaagcgggcggagcagctcttgccgatgtaatctttggtgatgtaagcccatccgggaaactggcgcagagtgtgccgatggatattaatgatgatccctcgatgattaattggccgggtgaagaaggccatgtagattatggtgaaggcgtttttgtgggttaccgctattatgatacctatgggaaggccgtcgactatccgtttggttatggtctgtcgtacgctacctttgaaattgggggggtaaaggccgttaagaccggtgctaatacagcgcgtgtaagcgcgactgtgaccaatacgtcggatgtggatgcggccgaaaccgttcaggtatacgtcgcaccgggcaaagccgacgtggcacgtccgaaacacgaattaaaagcgttccgtaaagtgtttcttaaggcccatgagagcgccgaagtgtcttttgatctggatgaatcagcctttgcctattggtcggaaaagtttaacgattggcatgtagaagccggcgaatatggcattgaggtagggatgagctcacgtgatattgccggggtcgctaccgtggcgcttgatggcgacggcaaggcgctgccgctgaccgaatggagtacgtttggtgagtggagtgccgacccggtaggcagcaaagttgtagcggacgtaagggaggccggggaacgcggtgaattacctaaactgccggacaacgatatgatgcgcatgtttttgggtagcatgccgattaactcgatgagtacgctgatgggagagagcggtaaagcgatttcaagttttatgttagacggctatgcaaagctggtcggctga

SEQ ID NO: 944 - DNA, 2304 bp, Artificial Sequence
  6xHis UPI0005018B5B
atgcatcaccatcatcatcatgagaatttatactttcaaggctcgatgtcggagagcacatacccgtcagtgaaagatttgacccttgaagaaaaagcatcgctgacctcagggggtgatgtgtggcatttacaaggcgtggaaagcaaagggattccggggtatatgattacggatggtcctcacggtctacgcaaaagcctagctagcagcgctggagagactgatctggatgcctcagttccagcaacatgtttcccacctgcagctggcctcagtagttcgtggaacccggaactgattcgcaaagtcggcgaagcgatgggagaagagtgcattcaggaaaaggtggctgtgatcctgggtccgggcgtaaacattaagcgtaacccgctcgggggccgttgtttcgaatattggtcggaggatccatatttggcgggccatgaagccattggtatcgtagaaggggtgcagtccaaaggagtaggaacctcactgaagcattttgcggccaataaccaagaaacggacagactgcgcattagtgcaaacatcggaccgcgtgcgctgcgtgaaatttacttaccggcgtttgaacacatcgtgaagaccgctcaaccgtggacggtaatgtgttcttacaatcgcattaatggagtatatagtgcgcagaatcgctggttactgaccgacgtccttcgtggtgaatggggttttgaagggatcgttatgagtgattggggcgcggatcatgaccgtgtggcaagtctgaatgcggggctgaacctggaaatgcccccctcttacaccgatgacgagattgttcacgcggcacgtgacggccgtattgcaccggcccaactggatgcaatggcgcaaggtatgatcgatctggtaaaccgcacgcgcgcagcgatgagtgtagacgattatcgctttgacgtcgatgcccacgatgaagtggcgcatcaagccgcagtagaatcaatcgtcatgttgaaaaacgacggcgccattttaccgttggacgcggatgccgccagtggccaaaaaattgcggtaattggagagtttgcccgtacccctcgctaccaagggggcggaagcagtcatattacgccaacccgtatgacaagcttcttagatgcgctggatgagcgcgggattgccgccgaatttgcacctggctttacgttagatctggaaccagcagacccggcgttggaggcgcaagctgttgatgccgcgaaacgcgccgataccgtgctcatgtttttgggcctacctgaagctgcggaatcggaaggcttcgatcgcgaaaccctggatattcctgcaaaacagattgcactgttagatgctgttgcagccgccaacgaccaagttgttgtggtgctgagcaatggatcggctgtcagcgtagctccgtgggctggccgcgccaaaggtattcttgaatcatggctgttgggccaggccggcggtccggctctggctgatgtgatattcggtcgtacaagtccgagtggtaaattagcgcagacgattccaatggacattaacgatgatccaagtatggttaactggccgggggaagaaggtcatgtggactatggcgagggagtgtttgtaggttatcgttactacgacacctatggtaaggcggtcggctatccttttggctatggcctgtcgtacgctacgttcgagattagcaaagcagcagtagcccgtacaggcgccaacgcagcagtggtgacagctaccgtgactaatacgagtggcgtggatggcgctgaaaccgtgcaggtctatgtagcgccgggtaaagccgatgttgcacgtccacgtcacgaactgaaaggttttgttaaagtcttcctgaaagcaggagagtccgccgatgtcgccattgatttggacgagcgggccttcgcgtactggtctgaacgttatgatgactggcacatcgagagtggtgagtacgctgtggaaataggcacgagtagcagagatattgcggctactgttaccgtggcgcttgaaggcgacggcaaaacacaacctctgaccgcctggtcgacctacggcgaatggagttcggatccaattggcgcaaaagtgatggccgcggttgcggcagcgggcgaagctggggagttacccaaactgccggacaacgcgatgatgaacatgttcctgatggcaatgccaattaacagtttaccgactctcatgtcggaaggcgggaaatcaattacacgttttatgctagacgagtacgcacgcttgaccaaatga

SEQ ID NO: 945 - DNA, 1818 bp, Artificial Sequence
  6xHis UPI00021EC81E
atgcatcatcatcatcatcacgaaaacctgtactttcagggtagcatggtcgttaaatgtgccaatccgtgggccattatgaccagctataacaaaatcaacggtacgcacgctgatagccacgaacctctgttgaagggtatattgcgcgggcagtggaattggcagggccttgtgatgtctgattggggcggcattaacagcctggcagatagtctgaacgctgcaggtgcgaaaggcattgtactactgaaaaacaccaacgatattctgccgttgaccaaagagaaagttaaaggtcgcaaaattgcagttttcggctatgctaaggagtgcttagcgcacggcggtgggagtgcgtcagtcaaccctcactaccgcgttacaccgtgggatgcactgtgcgaagcattcgctgatgctgatgttgaatttgtgtttgcgaagggcgcacacacgtttcgccagcttccagtcttaaccacggaagtcattggcttagacggcagccctggttttagtttgaaaattttcgaaacgggcgcctccgaaccgatgagcaccagccacggttttgctaaaagtgagctgtcattactggacgggcatgccttagaagataaagttgttgaaattgtgggtttcttgtctctgagtaaaccgggagtgtatcgcgtttcactggccggcttgggcccgaccaaactgttagtgaatggccgaatcgtgtttcatcaagtggaaccatgcttagatgcgatggcctttttattcggtggtagcccggtccctgaattcgagttggatctgtcaaaggatatgaagtacgaaatccgtatcatcagcgctccactccaatctacggacgggaaagatctgggcttccttaagggtcaaaccggcatgcgtctggggtttatgtctatgacggaatatggcaaggatctggtatcagaagcggttgaactggccagctctagtgactatagcattgtttttaccggcaacgaccctatgtgggaaactgagggccaggatcaggcgagcttcaacttgccaaaacagggaagccaagaccgcctggtagaagcagtcgccgcggcttgtcctgaatccactattgtagtgaactctacgggcgttgcggtggcattaccttggttggaccaggtagcagccctcctgcaggcgtggtttccaggccaggaagcagggcattccatttgcgatgtattaaccggagcgcagaattcagagggtcatctgacctgcaccttcatgaaacaattggaagattgcccggcgtatggtaatttcccgggggacttggatgatcaacagaaacgggaagtaaactacagtgaaggcgtgtttattggctaccgacatttcgaccgattgccacgcgaccgtatcaactttccgtttggcttcggcctgagctacaccaaatttgatttggccctatcaaacattagccagattaccgaagagaaatatctggtgcacgtgcgcgtaagcaatatgggcaaagtcgagggtgcgattgcggtgcagatttatgctggccgtaaagatagcaacccggaagacggtccgattcaggtgcttgtgggcttcaaaaaagttcgcattgaaccgcaagaatgtgcgagcattgacattccgatgtactgtcgcgatctggcatactgggacgagaaaaccggctattgggtactggatggtggcgaatacgtggtccacgtctctaaatcagcaggtgagcctatcgtttcttctgtggtttcgcttcgccagagtacatacgcgccgtga

SEQ ID NO: 946 - DNA, 2559 bp, Artificial Sequence
  6xHis UPI0007CE199C
atgcaccaccatcatcaccacgagaacctgtacttccagggctctatgtccgaagatctcaatgcgctgttagagaaactgacgctggatgagaaaatcagtctactcagcgcaaaaaacgtctgggagaccccggagattgatcgcgttggcatcccgtcactgaaggttactgatggtcctaatggcgcgcgcggtaacaacttttatgacggtaccaccgcggcatgttttccggcgtgtgttagcctggctgcgacattcaatcgctctctttcccgccaggtcggtcgtgccctgggccaagaggcgatcaccaaaggtgcgtacgtagtgttgggccctaccgtttgctgccaccgcagtccactgggtggacgtaattttgaggcgttttcggaagaccccttcttgagcggcgcgctagcctctgaatatgttattggccttcaggaggaacgtgtcgcggcgaccgtgaaacattttttggcgaacgaacaggacacccgtcgttttagtgtaaacgaaaaaatctccgagcgggcgttacgtgaaatttatttgcgaccgttcgaaatggtggcaaaacaagcagatccgtggtgcttcatgtcgtcgtaccctaaaatcaacggcaaacatgttgacgcccagaacaaatttttgattcatattctgcgtaagcagtggggctatgatggcatggtgatgtcggattggggcgctgccagtacggtggaaggcgtgaagtatggactggatatggaaatgccgggcccgcctcgtcagcgtacaccggaagcagtgcatgaggcgctgaaagaaggccgcgtaagcgaagcggacattgatgcacgtgtactgtcgactctgaagttattgaaaaaagtgggtaaattcgatgataggcgtgatactccggaggagcaggcagttgaccgtccggagcacagggcgctgatccggaaagcgggtgcggaaggtctggtactgctgaagaatgaccgttgtatcctccccattgatctgaagaaaactaaaaaaattgcactgttaggtccgcttgcgaaatacgcagccgcgcacggcggaggtagtgcgagcttaaattgtcattataaggtcacaccgtacgatgccttcatcgaccgcctgccaaaggacgtgcaaattacgcacgggaaaggcgcacacatttttcgcgtgtatccggatcttgaagcaggttgcatcaacagtaatggtaatccgggcttcgtggccgattattttatggaacttgatatctcggatgggaagtgtttccgcagcgaagaatttccgcgtggcagcttcaacactctcatgaatacgaatgtcaccggctgccagagcgttcgcttaagcactacgcacaaaccgcccattactggcgaccactacctgagttttagcggcctgggcccgagcaaattatttattgacggcgaactagtcgcggaacagacaggcccgactaaggatgcaatgggtttttttctgggggtgcaggacgaaattcgcgtccagtatagcttcaaaactggcaaagagtatctgatcgttgctgaaacacacccgagtcctgtgagcaatgctgaactttacctgatggataatcaatgttcaattcatctgggcttcattctgcaggcggaaatggaacaggatgtgctctccgaagctgtagaactggccaaagacgcggacttagcgattgtctttgtgggaaatactactcagtgggaaaccgagggtcaagatcttagtagcatgaacctgccggcggatggtagccaaaaccaccttattgcttcagttgccgccgccaacccgaacacagtggttgtgaacaccactggtgtcccggtcgaactcccgtggtttgaaaaggtcccggccctcatacaggcctggtatgcaggccaggaaacgggcaacgccatcctggacgtgctgttaggcgaaatttccccgtcggggaaactgccaattagttggccggtaaagtatgagcatacgggttgtcacggaaacttcggcttagacagttatgagtcgcgcgaggtagagtacgttgaaggtacccatgttggatatcgatggttcgataaactgtgggggtccgaaaaagaggtccgttttccgtttggttacggtttatcgtacactgaatttaaagtgaagaacgcgcaagctaatggaagctttgaagaagttgtgaaggtgaccgcagtggtgcgtaacataggccataccgcaggagcagaaactattcaattgtatgtggaaccgcccgccgaggatggtgtggtaaagaaattggtgggctttgggaaagtcgacctccagccgggcgaagagaaggatgttgaagtccagtttaaacgccaggatgccgcctattgggaggaaagcctgaataaatggatggtttcaaaaggcacatacggggtgctgatcgcgacctcaagcgctccgaaagacgtgcgggccagattagaagtggtcgtggatggcgatattgtgtttgagccttga

SEQ ID NO: 947 - DNA, 2304 bp, Artificial Sequence
  6xHis UPI0009A50F8D
atgcatcatcaccaccaccatgagaatctgtactttcagggtagcatgaaacgcgacatcaaagagattgtgtcgaaaatgactctggaggaaaaagcaggtctgtgcagcggtctggatttttggcacacgaaaggtgttgaacgactgggcgtgccgtctatcatggtcacagatgggccgcatggcttacgcaaacaagatacttcggcggaccatctggggatcaatgattcggtgcctgccacttgtttcccgtcgggcgcgaccttagcctgctcgtgggatcggtcgctgctccaaaaagtgggtaccgccctgggtgaggaatgtcaggcagaaggagttagcgtcattctgggtcctgcagcaaacatcaaacgttcaccattgtgtggtcgcaatttcgaatatttcagcgaagatccttatctgagcaccgagatggccgcgaaccatatcaaaggcgtccagagccaaggcgtaggcacctcgttaaaacacttcgcggttaataaccaggaacaccgccgcctgtctgttgatgccgaagtcgatgagcgtacacttcgtgagatctacttagctagcttcgagggcgcagtcaaacaaagccagccgtggacagttatgtgcagttacaacaaagtgaatggcacgtatgcatcggaaaacgaatatctgctgacgtcgatcctgaaggaagaatggggtcacgaaggcttcgtaatgagtgattggggtgcagttgaccgtcgcgaaaatgcactgaaggcggggctggaactcgaaatgccgagctctaatggaataggcgataatcgcatcgtgcaagcagttaaaaacggggaattaaaagaggaagtgttggataaggccgtggaacgcctgttgaatattatttttaaagcggttgataataagaaggaaggcgccgtctacgatcgcgagcagcatcactcgctcgcgcgtaaaattgccggcgaatgcatggtgctgcttaagaatgaagataacatcctgccgttgaaaaaggaaggcaaaatcgcggtaattggcggattcgtggataaataccgttaccagggaggtggcagctcccatattaaacctaacaagctcgataatgcggcggaagaactaaaaaaggctgcaaaaggcgaaaacattgtgtttgcgaaagggtttagcctggataatgatgaggtggacagtaaactgatggaagaagcaaaaaacgctgcggccagtgcggaaaccgccgtgatttttgcgggactgcctgatcgatatgaatctgagggttatgatcggagccacatgcgcatcccggacaaccagatcgccctcattaacgcgattgcagaggtccagaaaaatattgtcgtggtactgagcaatgggtccccgattgagatgccatggattggaaacgtgaaaggtattctggaagcctatctgggaggcgaggctggcgccggagctatcgcagacattttatttggcgaagtcaatccttcgggcaaacttgcggagtcgtttcctaaaaagctttcggataatccgagctacctcaattttccgggcgaaggggatacggtggagtataaagagggactgtttgtgggctaccgctattacgacaaaaaagaagtagaaaccctgtttccgtttggctacgggttgagctacaccaccttcgagtataagaatatcacggtggacaagaagaacattacggatgaagaaaagctggtggtaaaggttaccgtgaaaaacacgggtaagctgaccggtaaagaaattgtgcaactgtacgtacgtgacgtagaatcaagcgtgattcgccccgtgaaagagctaaagggattcgaaaaagtagaactggcggccggtgaagagaaaactgtggaattcgtgctggacaaacgtacctttgcttactacaacgttgacatcaaggactggtatgtggagtctggtgattttgaaattttaattggatcatccagcaaggacatctacctgaaggatgtggtcaatgtcgaaggaacaaccgctgttaaaaaaatttatacccgcaattctacagtcggcgatgttatggcgaacccgcaggcccgcaaactgactgaggaactgctgtcgagcaccttcggacaggggacagatgactcggaaaacctggggacggacatgactgcaatgatgaaagatatgaccctacgtagcattctgcattttggcggtgataagagcaaagaaaaggagctggataagatcctggaaatgctgaacaaatga

SEQ ID NO: 948 - DNA, 2604 bp, Artificial Sequence
  6xHis UPI000D22F5EB
atgcaccaccatcaccatcatgaaaacctttattttcagggctctatggcgcaggagtccggcactgtccatgacgatgaaagtctgcaggcactggtaggtcaaatgaccctagaagagaaaatcaaaatgctgagtgcgaagaacgtatgggaaactcccgagatcgatcgactcggtatcccgagtctcaaagtgacagatggcccgaacggggctcgcggcggctcgttttttgatggcacgaccgcggcctgcttcccttcatgcgtcagcctcgccgcgacctttaaccgttctcttagtcgccaggtggggaaagccctggaacaagaagcaattacgaaaggtgcgtacgtgctactgggaccaaccgtatgttgccaccgtagtccattaggtggtcggaacttcgaggctttctcggaggatccgtatctgtcaggtgcgttagcgtcagaatacgtaaaaggcctacaagaagagcgtgttgctgcgactgtcaaacatttcttagcaaacgaacaggacacccgtcgcttcagcgtgaatgaaaagattagcgaacgtgccctgcgcgaaatttacctgcgcccctttgaaatggtggcgaaggaagcagatccgtggtgctttatgtcgtcgtatccgaaaattaacggtgcgcatgtcgacgcccagagcaaatttctagtggatatcctgcgcaaggaatggggctataagggtctgatcatgagcgattggggagctacgtcgacaccggaatcagtacgttacggccttgatctggagactcctggtccgccccgttggcgcacgaccgatgcagtgactaagtgccttgcagatggacatattgaagagagcgacattgatgcgcgagtgctggcaaccctgcgtctgctgaaaaaagtaggcaagtttgatgatcgtaaaaccacccctcctgagcaagcgattgatcgtccggaacatcgcgccctgattcgcaaagcgggcggggagggtatcgtgctgcttaagaacaacgggaatcttttgccgatagatactcgcaaaaccaaaaagatcgccttattaggcccactggctaagtatgccgccgcccacggaggcggctctgcaagtcttaattgtcactataaaatctctccttacgatgcgttcgttgcacgtcttggcggtgatgtagagatcactcattctaaaggtgcccatattttccgtgtctaccctgatctcgaagccagctgtaccaacgcccgcggcaacagcggctttctggcggaatactttatgagtagttctacgacagaaaagccattctggaccgaagaattcccgcgtggcagtgttactactctgatgaataccaaagtgattggatgcaagaccctcaagtttaccactacataccagccgcctgtatcaggcagtcactacctgtccttcagtggcctgggcccttcgcagctgtttatcaacgatatgctggttgcggaacagaaggaaccgacgaaagacgcgatgggtttccttttgggggtccaagaggaagttagaattcaatatccattcagctcaacccagtcctacgcgatctctatggtgacgcaccccagtccgttctcgaatgcagaattgtacctgatggaaaaccagtgcgctattcacatcggcttcatcgcccaagaagaaatcgaacacgacgttctgagtgaggcggtagatttggcgagcagcgccgatttagcaatcgtcttcgtaggcaatactatacagtgggaaacagagggtcaggatcttgaaacaatgacgctcccagctgatggttcacaagataaccttatttcacaggtcgttgcggcaaacccaaataccattgtggttaacactacaggagtaccagttgaactgccctgggtcgatagtgtcccggcgttactccaggcatggtatgctggacaggaatgtggtaatgctatcctcgatgtgctgctgggtgaggtgtccccgagcggtaaactgccgatttcctggcctaaaaaatatgagcatacaggctgctacgggcattttggtctggacagcttcgaatcacgcgaggtggaatatgtagaaggtgtttacgtaggctaccgctggtttgatcagtggtggggccaggacaaggaggtccgcttcccctttggatttgggcttagctatacggaatttgatattagcgatgcccgcattagcggcgcgatttcaggtgatgagtcgtcccaggtgaaagtttcagccaatatccgtaacatcggggaccgctttggcgcggagaccgttcagatttatgtgcagccaccagcattagccgacttaggccgccccctgaaagatcttgttggctttgtgaaggtcgaattaaaaccgggcgaaactcgtgacatcactgtgtgtttccagaaagataatgtgtcgttttggaatgagaaggctaatcagtggcgtgtttgtcgcgggacgtataatgtcctgatcgctacttccagcgatccgaaagatgcgaaacaggcgcttcgtttcgaagtcgaagaggatttagacttcgacccctga

SEQ ID NO: 949 - DNA, 2577 bp, Artificial Sequence
  6xHis UPI000F7332F8
atgcaccaccaccatcaccatgaaaatctgtatttccagggctcaatgaccggccaaaaagtagcagattatagccaaggctccgaccgcgttcgcgatctgctctcaaaattgacccttgaacagaaagtatcactgctggcggctcaggacttttggcgtacccaggcgattccggaacatggtatcccgagtatgaaagtaaccgatggtccgaacggtgcacgtggcgaattctttactgatggtactccggccgcactgtttccgtgcggtgtgagtctggctgctacatggaacacaaaattattgagaagtgtgggcaataccctggccgctgaaactaaagcccgtcaggcacaggtgctgttagcaccaaccgtttgcatgcatcgctccccgctgggcggccgtaattttgaatcctttagcgaagacccactgtttgcaggtaagatgagcgcagcgtatatcaatggtctgcaggaaggaggagttggggctacgatcaagcactttgtggccaacgaacaggaaacgtggcgtatgagcgtaaattcggtggtggaagaacgcccactgcgtgaaatttatctgaagccctttgaaatcgccgtgcgtgaagcaaacccgtgggcggtgatgtccagctacaacctggtgaatggtagtcatgcggacatgaatgaattcactctgcgcaaagttttgcgggaagaatggcgcttcgagggtttagtcatgagtgattggggcggtacgaattcaaccgtagaatcaattaaggccggggttgatctggagatgcccggcccgtcgaagatgcgtgcccagaaagtcatggatgcgctgaagaaaggcgagttaaccgagaatgatattggcgagtgcgccgctcgtgtgctgaatctggtagaacgcacgggtcgttttgacctgcctgttgaggaaccacaagaggaagctattgacacccaggagacacgtgacctgatccgtcaggccggcgtggaagggattaccctcctcaagaacgagaataatgccctgccgattgggaatgaagttaaacgcattgcgttaattggcccaaatgtgaaacaagcaatcgcaggcggcggtgggagcgcgagtttaaaaccgtactatttgaccaccccgtttgatagcattagtgcgctttcgggcaaagaaattgtgttcgcacaaggcgcacagacggataagtggacccctctggccagcaacgtgtgtaccacggaaccgggcaagccaggcgttattctggaattctacaaaggggacaaatttgaaggcaaaccaatgttcgtccagaaccgtccgaaaaccgatctgtttctgtgggataatgcaccgaaagaagtgctccctgaatacagcttccgtgccaaaacggttattgtgccggaaaccaccgggaagcacacttttggactgagttcggttggcccggctaaaatgtacatcaacggtaagctgctgatcgacaactggaactggaccgaagcaggtgaagccatgtttgaaggtagcattgaggtgaacgaatccattcagctggaggtgggttctaaagtcgagattttaattgaaagcacgaacgaggtgcgcccggcgcctaaagcgggcgctggtggccctacttatggctatggtggctgccgtattggttatattgaaggaccggacaaagattttatcaaagaagccgcggaaattgcggcaagtgccgatgttgcggttgttatcgtggggttagatgccgagtgggaatcggaaggttatgatcgtcagacaatggatctgccgaaagagggcaatcaagatcgcctgattgctgcggttgctaaggcatctccacgtaccattgtagtaaaccagagcggaacaccagtaaccatgccgtgggttaatgacgtaccggccatcattcaggcgtggtatcaaggccaggaagcgggtaatgcgttggcggatgtgttattgggaactgcgaatcccagtggcaaactcccggttacctttccaaaacgccttgaagataacccggcgtaccataactggccgggagaacatcgccgcgtggtgtacggcgaaggtatctacattggctaccgccattacgagcgtgcgcgcatcgagccggagttcgtcttcggccacgggctgagctataccacattcgaatatgggcccgtgaccattaatgattccgtgttgacagagaccaacaaacttaccgtcagtgttccggtcaccaacactggtagccgactgggtaaagaaaccgtgcagttgtacgtacgcgatgtcaaaagccgtctgcctcgtccggataaagaactcgcggcatttggcaaaattaaactggagccgaaccagaccaaactgctggatttggtcatcgataagcatgccgccggctattacgatgtctcgctgagcagttggatagcggaggaaggcgaatttgaggttttgattggcgcctccagcgcagacattcgcggcaaagcgacctttgaagtaaaggagtcgtttacttgggtgttttga

SEQ ID NO: 950 - DNA, 2469 bp, Artificial Sequence
  6xHis UPI0000F550EC
atgcaccaccatcatcatcacgagaatttatacttccaaggtagcatgagcggggcagttgaccgcccggaacctgatgaatcgcgtctgcgtagcttattagccggcctgaccgttgaacagaaagcccgcttgttgacgggttcaggtttttggaccttacatgcgatgccggaaattggtttacaccgtatggtgctttccgacggaccgaacggtgtgcgtggcaccaagtgggacgaacgtgataccagcctccttctgcccgttgcgtcggcagttgcggcaacgtgggatgtggacgccgcccgtctcgttggcgaactgtttggggatgaagcacgtcgtcgtggcgttcatgtggtactagcgcccacagtgaacctccatcgtagcccgtttggtggacgtcattttgagaacttttcggaagatccgctgctggtgggagaaattggcgcgcaagtcgttaaagggattcagagccgtggtgtggctgctacgccgaaacactttgtcgcaaatgattctgaaactggccggatgacctacgatgctgtcgtcgaaccgcgagttctgcgccaggtatatctagaaccgtttcgacggattgtagaacaggcgcgaccgtgggccgttatgaccgcgtacaacagtgtaaatggccacagtatgacggagaatagcgaactggtgaacggtattctaaaaggggaatggggctgggacggcgtaaacgtgtccgattggcttgcagctcgtgattgtgagcgctgcgccctgggcgggctggatcttgtaatgccaggacctggaggtccatggtctggaggagcgcttgctagagctgtccaagaaggccgcgtcgccgaggaattattagacgataaagtgttacgtctgctaaggctggccgcacgcaccggagccttggatggcgaaagtgaagtggatctgtcgggtcctcccgacgaggcacgcccggttattcgtaccctggcagcccgtggatttgttctcctgcgaaacgcgaacgtggatgatcagccggtccttcctctcagcgccagcgtgggcaaagtcgccgtgatcggcgagaacgccgtattgccagcggtgcagggtgggggctcgtcacacgtttcgcctccgcacgtagtgaccccgctagacggtatccgtgccgccttgagcgatgcagaagtggtttttcgtcgcggcgtacgacatcgccgattactggatccgattccccgtgaacgagtgcacgacccagaaggtgaaggcgatggcttacgcctggattttgtgggcgacgatggcgcggtactgggctcggaacttcgcggcaccgaaaccctgttgtggctgggcaaaagtgatatcccgcgtggtaccgccgtgcttcgtcttcgcggcgatttacgtgccgagccaggggaacatgtcttcggggttcatggatcgggaaaattcgaagtcgagatagcgggtcgagtggtcttcgatggcgaagtggcgcgtcaagtggatacggacgatccgttagcggacatgattgaacctcctgaacaacgcgtggatgtggtgctggttgatagcgatttaagcgaggatggcaccgtggcagttgccgttgactttgcgcctgacggtgatacagtcattgcgctgggtttaggacatggcggcctggtccccgatgccgccgcggaattcgacgccgcagtgcgcgctgcacgcgaagctgatatcgctattgtcgtagtgggcaccgatgccgaaatcgagaccgaaggccgggaccgtcattcactcgatctgcctggagctcaagatgccttagtggaagctgtcgctgctgctaatccgcgtaccgtggtggtggttaacgccggaagtccggtgttaatgccgtgggttagggatgttcctgcagtactgtggacctggtttggcagtcaagaatacggtgacgctttagccgatgtactgttaggcgttgcggagccgggaggtcgcctccccacgaccttaccaaccacgaccgccgacgtcccggttccgcttccgcgcgtacagcctatggacggtaaactgcattattcggaaggcaccttgattggttatcgggcgtatctagctcgcgactcacgtccggcatttcatttcggtcacggcctgggctacacctcatgggaatatgtagatgcagctgctgttcccggcgcggtgcgtgtgactgtacgcaactgtggtgagcgagcaggacgcgaggttgtacaggtgtacgcagcgtctcatggacgtcctccgtggctagctggatttcgcgtcgttgatgtcgaggccggtcaggaagccgaagttgatgttgcggtacgtattcctgatggttcgggcgaacatcgtctgttaaccggtaggtcgtcaggtgacattagactcaccattgttgttaataactga

SEQ ID NO: 951 - DNA, 2493 bp, Artificial Sequence
  6xHis UPI000204906E
atgcaccaccatcatcatcatgaaaatttatacttccaggggtcaatgactgagactggagcgcataccgcggcggacgccgccagggaatcagttgttgaagcggcactggcgaaattggacctggacagtaaaacccgcttactagcgggccaagacatgtggtctcttcctgctctgcctgaaattgggctcacgagtttggttatgtccgatggacccattggcgtgcgcggagtacgttggacggcggacgacccgagcgtagccttaccgagtccaactgctttggcggcggcgtgggatcccgcgctggctcgtcgtgctggccgtctgttggcgcaggaggcacgtcgcaaaggcgttcacgttctcttagcaccaaccgtgaacttacatcgcaccccgcttggcggtcgtcattttgaagcctatagcgaagatcccttacttaccggcgccatcggtacgggttacgttcagggtgtgcaggatggaggggtgggaacgaccgtgaaacatttcgttgccaacgatgcagaaactgatcgctttaccgtggacaatcgtattgcacctcgcccactgcgtgaactgtatctagcaccgttcgaagccatcgttaagaatgcgcacccgtggggcattatgacggcctacaaccaagtcaatggcgtgactatgaccgagcatcgtcacctggtgaacgaagtgctcaggggcgaatggggctttgatgggtttaacgttagcgattggatggccgcgcgttcgaccacaggagatattgagggtggtctggatgtggccatgccgggtccgcagacggtttatggtgaagccctcgcggccgcagtccgtgcaggcgaagttgaagaaagcacagtggatgcggcagttcgtaatgttctccgtttagctgcccgtgtgggggccctcgaaggtgctcccccagtggttaccgatccaccggccgcaattgacggtgatgcactcgctcgtgaaatcgcccatcgcggtttcgtcctggtgcgtaacgaaaatggcgcactgcctctcaaaaacggaaccgttgcgctcagtggcgcagcggcgcgtgatgcgcgtgtactgggcggtggttcagctcaggtatttcctgaacacatcgtgtcacctctggacggcctgactgccgccctgccagagggtgccttgacctacacgattggcgcggatccgtcagatgagctcaccccagccgatcagggtttcaccctgcgtgccgtttgtcgagatgcttcgggtacggtgctgggcgaaggcacattaccgaacggtcaagtgcagtggataggcgatgatctcccggcgggtgtgacgcacgaagccttggcctccattgaagttgtgggccgctttacgccgcgcgaaaccggtgaacacgcatttggcacccgaggcttgggcgcattccgcctatcagtcgacggcgagacactttttgatggtgtccaggcgctgggcccggaaaccgatccctttgaagcgttttttggcagcccagttgaacgtgctaaagttgtcctaacagctggagagaccgtggatgtttcgctgcttcacacgctggacaaagagtttgccgcgcctctgccggctgtaatgtttagtttcgtgcacttaggcccgcggagggatcctgatgaactaattgcggaagcagtggaagcagcgcgtgcggcagacacggcagtggtagtggttgcgaccaccgaacgcgttgagagcgaaggctttgatcggaaggacctagcgctgccgggccgccaggatgatttagtacgtgcggtggctgccgcaaatcctaacacggtggttgtggttaatgcgggctctccagtagaactcccctggcgtgaagaagtcgctgccgttctgttatcttggttcccaggtcaagaaggaggtgcggcgcttgcggatgttctgactggtgccgaagagccgggaggccgtttacccacaacgtggcctgctgcattggccgacgcgccggtaacggaggttacgccaaccggcggcgaattagattatgcggaaggtgtctttattggctaccgcgcatgggataaagccggcgcggttccggcgtatgcatttggtcacggccttggctacaccacgtggacgtatgaatcgctaaccgcgcgcccgggtaccgcgacggttcgcctaaccaacaccggtgatcgcccaggtcgtgaggttgttcaggtctatcttgctccggtggatgatggcgtagaacgcccggccaggtggttggcaggctttggatgcgtagaagcaggcccaggcgaaacggttgaaacggaaattgcgttaccacgtcgcgcttttgaaatctgggatgaagagaaaaatgattggtcctttgtgggtggcgcgtatgaagttctagccgcccgttcactcaccgatgcacgcttatccgccacattagaagtgtga

SEQ ID NO: 952 - DNA, 2307 bp, Artificial Sequence
  6xHis UPI00027DFDB0
atgcatcatcatcaccaccacgaaaatctgtactttcaaggtagtatgaataattacccgttaatcgaaggcttgtcgctggaagataaagccagcctgatttcaggcttcgccttttggaacaccaccgccattgaaacatcaggcatcccatcagtcgtattatcggatggtccacatggtgttagacgccaggagcaaggcgctgaccacttaggcattaacgctgctcgtccgagcactgcatttccgaccgcgagcgcctcagcttcaagttgggaccgtgatttgctaggcaccatgggtgtggcgttaggcgtagaagcccgcgcccttggtgttgacgttttgttgggccctggcgtgaacattaaacggagccccctttgtggtcgaaacttcgaatacttttccgaagacccgctgctgtcaggtgaacttggtgcggcctgggtgcgcggcctaaaatcacagggagtgggcgcgagcgtaaaacactatgttgctaatgaccaggagacggatcgtatgagcatttctgctgaagtggacgagcgtaccctgcgtgaaatttatctcaaggcttttcatcgtgtggtggcgaaaagcagcccagcaaccgtgatggttgcctataatgccgtgaatggagaaccggttatttcgaaccattggctgctgacccagatcctgagagaagaatgggcgtacgatggtgtcgtggtgagtgactggggcgcggccgcctccgacgtcgtggcggccgtgcgtgcaggactggatttggatatgccgggtaccggtgcgggcagtgcggcattaattgacgctgtgacctcaggaacgcttgatgaagcgatcctggaccgcgcggcgtcacgagtagttgaacttgcgactactttagtcggcaaccgcgcacacgcaagcgatctggatgtggatgcccaccatgcactggcccgaaaaattgcggagcagtccggcgtccttctgaaaaatgaaggagttcttcctctgactgcagaaaccgcaggcacgattgccgtagtgggagaatttgcacgtacgccacgctatcaaggtgcaggtagttcacacattgtgccgacgcgactggactctgcgctggatgccatccgagaacgcgcgggagacaggctggtacattttgagccaggttttacattagatggcaaacacaacgtcgagctggttgatcgtgccgttgcagcagctcatgacgccaccgatgtggttgtattcttgggtttgccgccggaagacgaatcggaagcctttgatcgcgtcactatggatctgcccgcggatcagctagcgctcctgcagcgtatagcgtcggttaatgacagagtcacggtagtcttatctaacggtggcgtggtttccgtggaaccgtggcgaggtagcgttgccgccatcctggaaatgtggctcgggggccaagctgctggcagcgcggctgcatcccttctgtttggtgatgctaacccgagcggcaagctggccgagactatcccgttagcgctcgcagatacgagctcattccataactttccgggcaatggtcagaccgttctgtacggcgaacgcatctatgtcggctatcgccattttgattcggtgcgccatgacgtggcatacccgttcggtcacgggctaagttatacaagctttaaataccaggatctgagggttgacgtaattgaggatgctctggaagtgcaggtgacaattacgaacagtgggcctcgtgatggggcagagattgttcaattctactccgttccgccgaagagcggtgaggaccgtcctacccatgagctaattggcttcgagaaagtgacggtgcaaaccggtgccagtgtacgagttaccactcgcattccgttgggcgatttggactattggtcaataaaatctcgccagtgggttcgcgctgatggcgtttatactatccaggtggccgctagctctcgtgatatccggctagaagccggcattgaactggttggcactgaacctgccagaccgctgaccttagacagtgcaatgggtgattggttcgcggatgctgacggcgctgttgcgctccaggaaatgatggcccagttcgcgacccgcggttcaggcgaatgggatgatgccacgcgtccgctggttttaccaatgccactccgtaccattttaccgatggccgccagcaaactgccgttcccagtgttaggcgaacggcttctgcagcgcctgagcgaactgagggccgacccgattggccgctcctga

SEQ ID NO: 953 - DNA, 2286 bp, Artificial Sequence
  6xHis UPI00033420CB
atgcatcatcatcaccaccatgagaatctgtacttccagggctcgatgaatattgatgaaattatgaacgagttaaccttagaagaaaagtgctccctactttcaggcgcagatttttggaacttaaagagcattgaacgacttggtatccgtaaaatcatgatgaccgacggccctcatggactccgtaaacaggatatggacgcgtcggaaattgggctggaaaaaagcgtgccagcgacctgttttccctcaggggcggcgctggcgagcacatggaacaaaaacctgatcaaggaagtaggcaaagctattgccaaggagtgcctggataacgatgtggacgtactgctgggaccggcggttaatatcaaacgctcaccgctgtgtggtcgcaattttgaatactatagcgaagatccggtcctctcgtccaaaatcgcgaaatacttcattaagggtgtacagtcccagggcgtgtccgcgtgtatcaaacatttcgcggcaaataaccaggaatttcgacggttgacgaccgacgtgcgtgtggacgagcgtgccttccgggaaatttacctgaagtccttcgaggaagccattaaagaagctaagccggattgtgtcatgtgtgcttacaacaagatcaacggcgagtatgcgagcgataacaaaaaactgcttaatgatatattacgtgaagagtggggctatgaaggcgttgtgattagcgattggggcgccgtaaatgatcgcgtgaaaagtttggaagcgggtatggacattgagatgccgtcatgtttcggtgtgaatgatcgtatcgtctacgaggcggtgaaatcaggaaaaattaaaatcgaagtgctggaccgcgccgtgaaacgcatccttaagcttatcctgaaacattcgaataaaagccagacccgttgcgtggactatgaatacaatcaccgtttagcctcaaaagtcgctgaagaggccgtgatcttgctgaaaaatgacgatgatattctgccactgaataaagatagccgcattgcaattatcggtgagttcgcgaaaaatccgcgtttccagggcggcggatccagtcacgttaacccgacgaaactggagtgcccgatcgatgaaatcaaaaagtacgcaaattccgttgtgtacgcgcgtggctttaatagtaacaacgatgagattgacgaggccctgattaaggaggcagtaaacttagcaaaaattagtgacgtggtggtgctgtttctgggcttaccggagcgctatgaaagtgagggcttcgatcgtgcagatattaaactgccgtacaaccaaaacatcctggtagacgagatctacaaagtaaacaaaaatatcgtggtgtcactatcagttggttcttgtgtggaaatgccctggctggataaagtaaaagccgtgttaaatggctacttactgggccaagcaggtggcagtgctattgcgaatatactgtttggttatagcgtaccaagtgggaaactgtccgagaccttcattaaacgcctggaagataacccgagctacattaactttccgggcagtaacgaccgagtgtattatggcgaatcagtattcgttggttaccgttattatgattataagaacattgatgtgcagtttccctttggccacggcctgagctacacacgctttgagtattccaacttgaagattgacaaaaacgattatttcgatgacgaatgcattgatatttctttcaaacttaaaaatgtcggtaaatacaaagcgaaagaagtggtgcaggtctatatttctaagcccaactcctctatcattcgccctattaaggaactgaaagagtttgagaaaattgaattagacgtcggcgaagagcgtgaagtgaatttgaaaatcaaagtcgacgatctcagctactttgacgagcagttcaattcgttccttgtggaagaaggggaatacaagattctgatcggcagtagcagccgagatattcgtctggagggttcaattaaagtgaaaaatcgccaaaaggttaaacgtatgtaccatatcaactcaaccattatggatgtcatcaagaccgagaaaggcaaagagctgctaaaggaacttgtgcaaatgctggatgtcgatgagaacaatgtgcaggccaaaatgatgaaggagttctatcttaacatgccgctgagaggcttaatctattatggtaatggcaaatatgacttcgagaaactgaacgaaattattgacctattgaataatgaggcatga

SEQ ID NO: 954 - DNA, 2631 bp, Artificial Sequence
  6xHis UPI0003EA65B9
atgcaccatcatcatcaccatgagaatctctactttcaaggcagcatgttccagatgactctggaaatttatgaggaaattgaggcgaccctggcccagttaaccttggaagaaaaaatttctctgctggcgggcaaagacttttggcgcaccgttccggtgccggataaacaggtaccgtcaatcaaggtgtcagatggcccatcaggtgcgcgtggtgataccttcacgggaggggttcgagcagccttcttcccgagcggaattagcattggtgcgagcttcaatcgcgagctggctcacgaggtcggcgaacacctggcggaagaaatcaaaagcaaatccgctagcgttttacttgctccgaccgcatgctgtcaccgctcaccgctcggtggtcgcaattttgaaagctattccgaggatccgcttctgtcaggcaaaatggccgcgtcatatatcaacggagttcagagtaaaggagtggccgcgaccatgaaacacttcgtggctaacgaacaggagacaagtcgtttgtatgtcgatgaaacaattgccgagaccccgttaagggagatttacctgaaaccgtttgaaattgccatgcgcgaaggacgcccgttagcgatcatgactgcgtataacattgtgaatggggaccattgcgacttaaatccatacagcttaacgaaagttctgcgaggcgaatgggatttcggcggactagtaatgtcagactggttcgggacgaatagcatggtcgaatcgcttctcgccggccttgatctagagatgccgggaccggcaaaactgcgtccggttaaggaactgctggctaaagccgaacaggacgaaaagatccgcgaagctgtcgacaatagcgctcgtcgcattctgaccttcatcgcccgcgttggtaaatggaaagacatgaccccggaagcaccggaagtctcacgaaatgatcccgaaaccgcggcattaattcgccgcgcgggtggcgaaggggccgtcctgctgaagaatgaagatggcacgcttccgctgaaaccggccagcttaaagaaagtggcgtttattggcccgaatagcaaagctaccgttgcaggaggcggtggttcagcaaacctgaatccccattacttgacccagccgtacgaaagctttgtgacggctatcaaagagcagaatagtgatgttgaggttgtgcacgcacagggctgcatcattgatcgctgggtcccgattgtagattctgaaattgaaaacggacgctgtcgcaccccagggccggattcacaaccaggcatgttgctggaatggtttaaaggctacgacgcgaccggtgacgtcttaagcagttcagtcgagattagtagcaacctatttctgatcgatcggcgcccggccgaattatctccgcgtgaacccttttccgttaaactgagcggccagtttacagtgttggcagacggtgagtacaacatttcgctgagcacgattaccgccgcgaaattgtacctggatggtgacctgttaatcgacaactgggattttaaagagcgcggtgatttgatgatgaacgtgggttcggaagaggtagtggccaccgtggacctgaaagcgggcaccttttataattttacaattattaatagcagcatctggcctaaagactcgcccccggatcctccaatgcaggatattgccgccctgggtattcgctttgggttcgcgcctgtatcagataacagcaaattgattgcggcggctgcagcagccgtccaagactgtgatgcggttattgtggtggtgggccttaacaatgagtgggaaagcgagagctacgatcgcacggatactaagcttcccaatcatcaggatgatctaattgcggcaatcgcagccgcgaactctacggtgattatcgtcaaccagtcaggtagcgcggtagatatgccgtggtcggctaacccgaacgttaaaagcatccttcaagcgtggtatggcggccaggaggccggcaatgtgattgccgatgtgctgctgggcaaacagaatccatccggtaaactgccactcacgttccctgtgaaactgtctgataatccgacctatccgcacttcccgggcaaggatctgaaaagcgagtacaaagagggattgatggtcggttaccgctactatgataccgaaggcgtgaaaccacagttccctttcggttatggcttgagctacacctcattcgcgctgggagtcccaaccatttccacccgctcgctaactgaacgtagccagttctcagtagtggtggatgttagcaataccggcgaggtcgcaggcgcggaagtggtgcaggtatatgtggaacgcacaactgcaacctctcgaacgattaaacgtccggtcaaggaactcaaaggtttcaacaaggtgcatcttcaaccaggtgagaccaaaaccgtgaccgtaacggcaacagataccgacctggctgtttggggggaagttaatggcaaatgggtggtagaagcaggcgaatataaagtcttggtgggcactagctctgtgaaagaaggtctgcaggtggcaggtaccctgacggcagagcgtacgtggctctggatttga

SEQ ID NO: 955 - DNA, 2043 bp, Artificial Sequence
  6xHis UPI0003B38542
atgcaccatcatcatcatcatgagaatctgtacttccagggtagcatgtcggcgagctttgatgtaaacgacctaacgctggaagaaaaagcctcactgacctcgggaggcgatctgtggcatctgcaagaaattccagcgaaaggcgttccgggttggatgattaccgatggcccgcatggtctgcggaaagcggttcgctcagataccgcgaccgaccaatccgtgccagccacctgttttccgcctgcagccggcctatcgagtagctgggatcccgatctaattgatcgtgtcggccgggccatgcgcgagatttacttgccggccttcgaatatgtgatcaaacatgcgaatccgtggaccgtaatgtgctcatataacaaagttaacggcgtatattcagcgcaaaaccatcgtttgctgaccgagatcctgcgtaatgaatggggctacgatggcgtcgtaatgagcgattggggcgcttgtcacgatcgcgtggcatcactggccgctggcctgaatctggagatgccgccgtctcactcagatgaccagattgtgcatgccgttcgagaaggtcgtctcccggaacctctgctcgatgcacgtgctcaggagcttctggatttagcagcgaaggtggcgcctgctatggcgcgtgaaggttaccgctacgatcctaaagctcatcaagacgtggcacgcgcggcagcccgcgaatcaatggtgctgttaaaaaacgacgacgcggttcttccgctaagcgacgatgacgatttcgccgtggtcggagaatttgctcgcactagccgttatcagggtggaggctcttcccatattacgccaaccgaaatgtcgagtttcttagatgcgctgcgaaaccgaggtgtcgaagcggaattcgcacctggttttaccttagacgatgcagaccaggatgcggccctgaccaaggaagcggtagacgtggccagccgtcatgccaccacgcttctgtttattggccttccggagtcaagcgaatccgaaggttatgaccgaaccactatgtgtattcctgcaaaacagattgaactgctgcaccgtctggctaaagaagactcacgcctcgttgtagttttgtcaaacggttcctctgtgattacaagtacctggcaggacgatgcggatgccattattgagggctggctgctaggccagtcaggtggggacgcgaccgcggatattgtgtttggcgatgccacccctagcggcaaattagcacagtccattcctgtccgcttagaagacgatccgtcttacattaacttccccgggggcgaaggtaccgtggattatggggaaggcgtttttgtgggctatcgctactatgataccgtgggcagggaggtttcattcccctttggattcggcctgtcttatacaaccttttcgattgacgatctgcgcgttgaagcacagggcccatgcgatgctcatgtggacgttacggttaccaataccggaacacgcagcggctccgaaaccgttcaggtgtacgtggaacctaaaggtccgtcacctgtggcacgccctaaacacgaactccgtgcatttcggaaagtggaattaggtcctggagaatctcgtgtggtttcctttgatctggatgcgcgtgcgtttgcatattggagcgaagcgcgacatgattggcacgtggaagcgggcgattatgatattgaagtgggcagcagctcccgcgatatcgatgcgactggcaccgtcagtctggatggcgatggcaactcattggagcttaccgacttttccacatacgcggaatggattgcggatcccgtaggcgggccgattctgacgaaagcccaagaatccagcgattcggaacgcattcagggcatgctggcgaacccaaaagtaatggcgttcattcaggattttccgttgactatgttagaagcctttggcggcccggatgtggccaaggtttgttcgacggccattgcagagtatcgacgtacgagagatatccaggatgtgtga

SEQ ID NO: 956 - DNA, 2481 bp, Artificial Sequence
  6xHis UPI000409825E
atgcaccatcaccaccatcacgagaatctctatttccaaggatcaatggatgccacgactggcaccaacaaagcgccagcaccggcccaggccagacaaggcaacgggcgtggtggcaatgagggtcgtaacgcttcagaaatccgtcatcgcgttgatgatctgacccttgaacaaaaagcttcgctgacgagcggtgccgatgcgtggcatgtccagggcattgatgagtgcggcattcccggatacatgattactgatggcccacatggacttcgaaaagcgcgtcccgcggaagaacagaaaacgggtctgggcgacgcagttccagtcacctgttttccgcctgcggctggtctttcttccagctgggatccgggcctggtccgtgaagtcggcgaagccatgggggaagaatgtattcaggaaaaggtggcagtcatacttggcccagcagtgaatattaagcgtaatccattaggcgggcgttgctttgaatattggtccgaggatccgtttttggcgggacatgaggcggtaggaatcgtagaaggtgtgcagtccaaaggcgtaggcaccagcttgaaacactttgcggcaaacaaccaagaaactgaccgtctacgcatttccgctactataagtccgcgcgcgctgcgcgaaatatacctgcctgcctttgaatatatcgtcaagactgcgcaaccgtggacggtgatgtgctcgtataaccgcattaatggcgttcactccgcacagaatcgttggttgctcaccgatgttctgcgtcgtgagtggggctttcaaggtattgttatgtctgattggggtgcggatcatgaccgcgtggcgagcttaaacgctggcctgaatttggaaatgccgccgtccggtactgacgatcagattgttgctgcagttcgcgatggccgtattgcccctgaacaactggactctatggcgcagggtatgatcgacctggtggccaaggcccagccggcgatgagccgagatgggtatcgttatgaccgggatcgtcactatgacattgcccgccgagcggcgcgcgaaagtatggttctgttgaaaaacgaacagggtaccttacctgtacgtcccggagtgcgcgttgcggttatcggagaatttgcccgcacagcccgttatcaaggcggtggttctagccatatcacgccagaccgtatgtcgagctttctggatgcaacagcccgccgtggtgaacaagttgattttgcgcctggttttacgctggatttagatccggccgatccggtattagaagcacaggcaatcgaaactgcgcgtcatgcggatatcgtgctgatgtttatgggtttacccgaggcagcggaatctgaggggtttgatcgtaccagtctggatattccggcgaaacaaacgagcctgctgcataagatttcagccgtaaaccctcacgtggcggtgattctgagcaatggttcagtagttagtgtagcaccgtggtgcgatgatgcccaagcgattctggaaagctggctgcttggcgaagcgggtggagacgcgttggcggacgtggtgttcggggatgtatcaccaagtggcaagttagcccaaacaatcccgttggacatcaatgatgacccgacaatgctgaactggccaggcgaggagggtcatgtcgattacggtgaaggcgtcttcgtgggctatcgctactacgatacgtatcgcaaaccggtcgcgtacccctttggctttggcctgtcgtatgcgaccttcgatgtgcatgatgcgcgtgtacgtcgtctgggagtagatgacgctgcacgcgtagctgcggaacgcgcggcaggcgatgccgcccagggcaacgatgtggctcgcgcagatggagcggcccatgttgatggtgcgtgtggagccgttgttcgcgtggatgcgacggtaactaacacaagcgacgcacctggtgcccaagtcgtcgaaatctacgtggctcccggtaaaagtcaggttgcacgcccggtccatgaactgaaaggctttgccagggtcgacctagctcccggggaaagcaaagctgtttcaatcaccttggatgagcgcgccttcgcgtactggtcccagaggtttgatgattggcatgttgaagccggtgattataccgtggaagttggcacctccagtcgcgatatcgtcgcccgaattccggcacatttagatggagatggtaagaccatgcctttagatgagtggagcacctttggtgaatgggcggcagatccggtgggcgcacgtgttgtagaggccgttggacgcgaagccgatcaaggccgtctgccacgtctcccgcagaatggtgttatgcgtatcttcctcatggccgccccggttaatagcctgcagatgatcctgggtgaagaaggcttagaggtggcgcgtttcatgctggatgaataccgccgcatccgtggttga

SEQ ID NO: 957 - DNA, 2604 bp, Artificial Sequence
  6xHis UPI0005C0229F
atgcatcatcatcaccatcacgagaacctgtacttccagggttctatgaccgtcgattctctccgccgcgcgctgaatagcagtgatgaggatattgttaagttgtgcgggctgctgaccatcgatgaaaaactgagccttttggcggccaaaaatatttgggaaacccaggagatttcacgcttaggtattccgagccttaaagtgaccgacggacctaatggcgcacgaggtggagaattttgggatggcaccacggcggcatgcttcccggcgtgtgttagcattgccgcgagttttgataccgaattgtctgaactgattggtcaggccctcggtcaggaagcccagaccaaaggtgcatacgttctacttggccccacggtttgttgccaccgtagccccttaggaggccgtaatttcgaagcctttagcgaggatccgttcctcagcggcagtctggcagtagcgtatgtgaagggtttgcagagccagcgcgttgcggcgaccgtgaagcatttcttggggaacgaacaagacacccgccgctttgttctgaacgaaatcataagccagcgggcccttcgcgaaatctaccttcgtccgttcgaaaaagtcgtgaaagaatcgtcgccgtgggcgttcatgacgagttacccaaaaatcaacggctatcatgtggacgcgactccgacatttatccgcgacattctgcgtggccagtggcactacgatgggcttaccatgagcgattggggggcgacaagctgtattacgtcaattaagaacggcctggatttagagatgccgggccccccccgtattcgaacccctatggctattaaaactgccctggcgtctaagagcattagcgccagcgatgtggatagttgcgttatgaatatcttgaaactgctcaagcgcgtggggaaattcagcgatcgtaaaacgacccaggctgaagttgcgctggatcggccggaacatcgtgcgttaatccgcaaagcgggcgcagacggtagcgtgttgctgaaaaaccgcgacggaattctcccgctgtcccagtcaagtattaaaaaaattgcgctgttaggccccctggcggactatgcggcagcgcacggaggtggttctgcgtcactgaactgtcattacaaggtgaccccattagaagccttccgcaaacgtctgggaaatgaggtagaaattactcatggaaaaggcgctcatatcttccgagtgctgcctgatctggaagaaggtaccaccaacagcaatggaaaaccgggcttctgcgcagagttctttatgacctcggatttgagtggctccccgtttcgtgtggaggagtatccgagaggtagtttttttaccctgatgaacactgaggtgaaaggcagccaaggtgtccgctttacctcaacctatcagcctccgatttcaggtttgcattacctgtcgttctcaggcctcggtccgtccaaaatcttcatcaacaacgaattaatacacgagcaactggaagataccaaagattccatggcctttctgctgggggttcaggatgaattcaactttcgttacaactttgacagtagtcgtgagtatctcatccgcattgaaactagccgtcagctggaggacaaatcagaattgtacctgctggatggccagatcgcggttcacttgggactggttacgcagcaggagcgtgatgcggatctccaagcggaagcggttaaactggcccgtgaagctgattacgcgatcatttttgttggcaatacggtccaatgggaaaccgagggtcaagatttagcaagcatgaaactccccgctgaaggctcacaggataatctcattgcagcggtcgcggctgtaaacgcgaaaacgatcgtagtaaacaccacaggagttcctatcgaaacgccgtggatagactcaattgctgcgcttattcaagcctggtacgccggtcaagaaactgggaatgcaatcctggatctgcttctaggcgatgtgaatccgtccggtaaactgccggtctcctggcctaaaatgtatgatcattgtgcatgctatgggaactttggccttgatgcctatgacagtctggaggtggaatacgtagaggacattttcgttggttacagacatttcgatcgcatgtacggtacggagaaggaagtgcgtttccctttcggtttcggcttaagttactctcagttcgagatcattgatgcggcctgtcatggtagtatttccccggacacggcagtgtcagtgtcgttcactgtacgcaacatctcatctcgcgccggggcggaaactgtacaagtatacctggcgcccccgaaatcctcaacagccggccgtccaccgaagtgcctggtgggctttaagaaggtttacctggacccgggccaatctcgtcgcgcagaaatctcttttattaaagacgatgccgcctactggaacgaggacgttcaaaaatggcaggttgagagcggtgaacattatattatcgtggcctcaagctccgcgacgaaagatgtaaaggcaaccattccgctaaccgttcagggtttcatcttcgatccgtga

SEQ ID NO: 958 - DNA, 2613 bp, Artificial Sequence
  6xHis UPI0007CECAD5
atgcaccatcaccaccatcatgagaatctgtactttcaggggagcatgccgtataaagttaacgacgagtcgcgtgagggcgagggtctgaatgccctgctaggagcactgaccctggatgaaaaaattagcctgctgtcagcaaaaaacatctgggaaaccccggaagtggagcgtgtcggtatcccctcattgaaagttaccgacggtcctaatggcgccaggggtggtgaatttttcgatggtactactgcggcctgttttccagcatgtgttagtcttgcagcgacgtttgatcgcgcattaagtcgacaagtgggccgtgcgttgggtcaggaagcgattaccaaaggggcatatgtggtactgggcccaacggtttgttgtcaccggtcgccgttgggaggtcgtaattttgaggcattctctgaggatccggttctgagcggtgccctcgcaagtgaatacgtcaagggattgcaggaagaacgtgtggcagccaccgtgaaacatttcctggcgaatgaacaggacacccgtcgctttagcgtggatcagaccataagcgaacgcgcgctccgagaaatctatctgaaaccgtttgaaatcgttgcaaaacaagcggatccgtggtgctttatgtcgagctacccgaagataaacggaaagcatgtggacgcgcagagcaagttccttatcgacattttgcgcaaggaatggggttatgaaggtatggtgatgtccgactggggcgccgcatcgaccgtggaagggattaaatacggcctggatatggaaatgcctggaccgccccgtcagcgtgaggccaacttggtacgtaatgcagtgaaaaaaggacagattagcgaaggcgacatagatgcacgcgtcttgtcaaccctgaatctgcttaaaaaggtaggaaagtttagcgaccgtaaagacaccccgaaagaacaggcaattgatcgccctgagcaccgtgctctgattcgcaaggcgggacgcgaaggtatcgtgcttctgaaaaatcagaataacattctgccgattgatattaagaaaacccagaaggtggcgctcctgggaccgcttgccaagtacgcagctgcacatgggggcggctccgcctctcttaactgccactacaagatcacaccgtatgatgcgtttactgaacgtctgggtaaggacgtagaaatcacccacagcaagggcgcgcatattttccgtgtttatcctgatttagatgccggttgtaagaacgcgcacggcaacgtgggctttctggcggagtactttatggagggcgatattgaaccgtccagtgtcccgtttcgaatcgaggaatttccccgtggttcttttaacactttaatgaacacaaatgtaactggctgtaagagcgtgcgctttaccaccacctaccgtccgccggtcaccggaaaacactatctatctttcagtggcctgggtcccagtcatctgtcaatcaacggagttatggttgcggaacagaagaactccactaaggatgcaatgagcttttttttaggtgtacaggaggaggaacgtgttcagttcgattttgatgcagccaaaacttatgatctgattatggaaactcatcccagcccgaccaacaacgcagagctttatcttatggaaggtcagacgagcatccatttagggtttattgcgcaagcagagatggaacaagacgtgctggctgaagcggtagatctggcgaaagatgctgacttagcgattgtgtttgtgggcaacacgacccagtgggaaacagagggccaggacctgagctcgatgacccttccggctgatggttcccaagacaacctcatcgcgtcggtagttgctgctaaccctaagaccattgtggtaaatacaactggcgtgccggtcgaattgccgtggctggatgatgttccggcatttcttcaagcgtggtatgcagggcaggagacaggaaacgctatcttggatgtgctgctgggtgaaatgagtccgagtggcaagcttccaatctcatggccgaaaaagtatgaacatacgggctgttatggcaacttcggtcttgatagctttgactcacgtaaagtggaatacgttgagggcgtctttgttggctatcgttggttcgaccgccagtggggtcatgataaagaggtacgatttccttttggctacggtctgagttacaccgaatttagcattacggatactcgcatctcggggagtattgcgaacgataaaaacgcgcgtgtaaccgtggccgccaatgtcaaaaatgtaggcagcatgtctggtagtgaaattctgcaagtctacctggaaccgccggtagaagaaggcatcgatcgtccggtcaagggcctcgtcggatttgttaaagtcgagctgcagcctaaagaagagaaaacggttgaagtcgtatttgctcgtgatgccgctgctttttgggatgaggccgctaatgaatgggcggtatcgatgggcttacatcacatcgtagtagcgacctcggctgcgccagtcgatattaaagcgcgtctggaactgcatgttgaaaacgcctttaagttcgacccgtga

SEQ ID NO: 959 - DNA, 2478 bp, Artificial Sequence
  6xHis UPI0009D58C49
atgcaccaccatcatcaccatgagaacctatactttcaaggctccatgacccagtatgcgattaaccaagaatattttgacaaagccaagcagattgcggcgaaaatgaccgtagaacagaaagcgagtctgtgttcgggtaaagatttttggcatactaaaccgattgaagaactctctgtgctttcgattatgatgacggatggtcctcatggcctgcgcaaacagaaggacgaagcagatcatctgggcattaatgaaagctatccggcgacctgttttcctccggcagccacatgtgcctgcagctttgataaggaattgatgtttgaaatgggacaagccctgggagaggaatgcattgaacaggaagtgagcgtgctgcttggtcctgcggtgaacattaaacgttccccgctgtgtggccgtaattttgaatattatagcgaagacccgtaccttaccgcggcgatggcgaaacaatatattaatgggattcagagcaagaacattggagcgagcatcaaacactacctggcgaatagtcaagagaagctgcgcttagttagcgatagtattgtggatgagcgggccctgcgcgagatttatttaccggcgtttgaagcatccgtgcgcgaatctcagccgtggacggttatgtgctcttacaacaaaattaacggaacctacgcgtcggaaaacaaaaagtatttgacggagatcctgcgtgatgaatggggctttaaaggcgcggttgtttccgattgggggtcagttaacaaccgcaatgaaggcgtcgaagccggcttagacttagaaatgccgtatagcggtcctgaaaatgataagagtatcgtgcatgcggttaaaaaccgcctgctggatatcaacgcccttaataaatgtgcagtgcacatgattgcactcgcactggcgtccagtgatgtgaagaaggaatcatgcgatatggatgaacacaataacttagcacgccgcattgcgcgtgaatcggcagttctgctgaagaacgacgatattttgcccattaaaaaaggcactaaagtggcagtgatcggcgagtttgccaaaattccgcggtaccagggcgcgggatctagcctggtcgcgtcctacaaagtgacaaatgtggtggacgaatttactaaaaagggaatagatttcgaatatgctcgcggctacgatgccaaatcagatatgccggatatgcagttaattactgaggctgttaaagcagcgaaacgcgcggatgtggcgatcgtattcgcgggtctgccagatgcctatgagtccgaggggtacgaccgtactcacttagaattacctccgagccatactatgctgattgagtcaatttgtaacgcaaataaaagtacagtggcggtgatctatacgggtggggttgttgtgatgccctggatgaagcttgtgaaaggagcacttctgatgtatctgacaggccagaacaatggcggtgcagtgtacgatcttattttcggtgactactcgccgtgtggcaagctggccgaatcctttccgaaagctctagaggacaatccgtcgtacaactggttcgccaagaaaaaaattgttgaatacagggaatccatttacgtgggctaccgttactacgacactgcgaataaaccagttgcgtttccgtttggctacggtttatcatacgctaaattcgaatactccggcttaagtctcgacaagagcaaaatgaatcaggatgaaattctcacggtgaaatgcaagatcaagaacacttcgttcattgaggccaaggaggtagttcagctgtatgtacgtgcatctagtaacagtatctttcgacctttgcgcgaactaaaacaattcaccaaggtgacactgaaaccgctggaagagaagacagtcacctttgaactgggcaaacgtgcattcgcctattggaatgtctatatttcggattggcacgtggaaagcgggcgctattttattgaaatttcgtcaagtagccgtgatactcgtctctccgcacagattgacattaaaggggatgataccgtgcgcatcccggacctaagccagaaggcgccggcgtattacgctttaagcaaggaaacgctgaatattcccgatgatcagtttcgtgccttgctgggtttcgagattccaaatgagccgtcaattcgaccgtttacgatcaatagcacggttaaagatatcaaaacctcactgacgggtcgcattctgattaagctgtttgaaggttacgcaacgcgcaccgcgaaagaactagccaaagatcaggaaagcgtaaaaagaatgatcgatgggatgatttatgacatgccactccgaagcctgtgcaccatgacaggcggcatgtttacgaaagcaaaggttgaaagcatcgtgacgatgttgaatggcaatatcatcaaaggcctcattggcgtgttgaaaaaatga

SEQ ID NO: 960 - DNA, 2658 bp, Artificial Sequence
  6xHis UPI000D50EED1
atgcaccatcaccatcaccatgaaaatttatacttccaaggcagcatgcaggtgcgcctgagtccggatcgaaagatggcgcttaaagcacttccgaaagacctgcaggaggtcgtaaatcgcaccttggaaggtctgtcgctggaagaacaagttagcctgctggcgggtgcggatttctggcgaactgttgaaatccaaggccgggtggcgggagtgaaaacaacggacggaccgagcggtgctcgtggacagttcttttccaatggcaccaaagctgcattctttccgtcgggggtgtcgttagctgcgacatgggataaagatctgattcaccaggttggtgaagcactgggcgaagaagcgcaatcaaaacaggctaatgtattgctaggtcctaccgcttgcaatcatcgtagcccgttgggtggccgtaattttgaatccttcagcgaagatccgtatctgtcaggtaagttagcggcagcttacgttaatggagttcagagcaagggagtcgccgcgactatgaagcatttcgtagccaacgagcaggaaaccaagcgctttaccgtgaatgaaattatcgatggccgcacccttcgtgagatctatcttaaaccgtttgaaattgccatgcgcgatgctggaccgtgggcaattatgtcctcgtataacgcgatcaatggccagcacgcagacgttaacgattttacgatgaaacagattctgcgtaaagaatggggctatgatggcctggtaatgtcggattggggtggtgcacatgatccggttgatagtattaaaacgggactggacctagaaatgccgggccccgcccttcgccgtggccaacgtcttctgaaagccataaaaggtcccaacaatgatccggagctgctcacggccattaagattggcgcgcgtcacgtactggaattagttgcccgtacaggcaaatggggtcgctttggcgaggaacccgaactcgcaaatgataaaccggagcaccgtgcccttattcgtaaagccgggaccgaagggattgtgctgctgaaaaatgagaatcgcgcgctgccaattagtacctctatcaagaagattgcgtggatcggcccgaacgcgaacgcctgtattgcgggtggtggcggtagcgcaaatctgaacccgcactacttgactaatccgctggatgcaatacgcggtgccgtgaaggagcacaacattcaggtgaattacgaaataggttgccaaacggaaaaatgggtcaaatcatttccgatcgcgggtggacgcgttaaaacgtcccccacctcgggcgaggatggcatgattctggagttctttggcggtcgtaagtgtcaaggcggtattgcgcgtgcgcggattatgaaaacgtcgacaattttcctaatggatgaaaaaccgccctccttagcagacaaagattactcgatcagactgaccggctattttacgccggaagtctctggggaacatattctgggcctgggagcagtgggccctacccgcgtgtaccttaatgatgaactgttcctggaccacactcattggacagaagcgggggaactttttttcacctccgggagcgaagaggtcacgaaaaaactgacactgcaggcgggcgaatggtacaaaattgtgaccgaatccactaccaaaagcccggatcagaaacttccggatatgggtaaagatgcgctcgatttcgcttccgctgttggcattcgtctgggcatcgatttggttcgcgacgcacaagagtacatttcgcgtgcagcggccctggcaaaagaaagtgatgtggcggttgttgtggtgggcatgaacgatgaatgggaaagcgaaggttacgatcgtcatagcatggacctgccggagaaacagaatgagctgatctctgcggtagccaaagcaaatcctcgcaccattgtcgttaatcagtcaggatgcgcggtaggtatgccgtggctggccgaagtgcaggggttacttcaagtgtggtaccaagggcaagaagctggtaatgcactggccgatgtcctgctgggaaaggaagccccaggcggtcggctcccgataagctttccgaaaaaagtagaggataaccctagctggggcaactttggtggtgacggcggagccaagaacgaagtccagtatagcgaaggcgtttttgtgggttatcggcattatgttagccgcaacattcctgtcttgttccctttcggcttcggactaagctatacaacgttcacgctttcatcactgggctttacccgcggtaaaaatacactcgcccccggtgcgacggttacaattgaagttgcggtcaagaacaccggtaaagtgaccagcagcgagaccgttcaggtttacatcagcccccgagctggctcattggtggaacgtccggcgcaggaattaaagggtttcggcaaagtcgagcttcagccgggtgaagaaaaggtggtaaaggtcgtgctcgacgaattcgcggtgggatatttcgaaacaagtgttggcaagtggcgtgcggaacgcggtgtgtacgtggcaagcgtgggccgctctgtagaagaagtggtggggaaactaggcgtcgttgtggaggaaacctacgaatggatcttttga

SEQ ID NO: 961 - DNA, 2571 bp, Artificial Sequence
  6xHis UPI000F728167
atgcatcatcatcaccatcacgaaaatctctatttccagggcagtatgaccggccagaaagtggcggattactcgcagggtaacgaccgtgtacgcgatcttttgagcaaactcactttggaacagaaagtatcactgctcgcggcgcaggatttctggcgtacccaggcgattcccgaacatggcattcccgcgctgaaggtaactgatggacccaacggcgcccgtggggaatttttcacggacggtacaccggcagcattgtttccgtgcggcgtaagcttagcggccacttggaatacggatctgctgcacagtgtcggtagtaccctagccctggaaacgaaagcgcgtcaagcacaggtcttgctggcgccgaccgtttgtatgcatcgttctccgctgggtgggcgtaactttgaaagttttagcgaagatccctactttacgggcaaaatgtctgccgcatatatcaacggcctccagtctggcggtgtgggcgcgacaattaaacattttgtcgcgaacgaacaagaaacgtggcgtatgagtgtagattccgttgtggaagagcgtcccctgcgggaaatctatctgaaaccttttgaaatcacgatgagggaagcccgaccttgggcggttatgagcagttataacagcgttaacggtctccatgcagacatgaacgaatttacccttcgcaaagtgctccgcggtgagtggaaattcgaaggtctggttatgagtgactggggtggaaccaactccacagtgcagtctataaaagcaggggtagatctggaaatgcccggcccaagcaaagtccgcggaaaattagcgctggaagcgcttaaacgaggcgaactgactgaagccgatattgaagaatgtgccgcgcgtgttttagcctggattgagcgctgcggtcgctttgacctgcctgccgaggaaccggaagagaaagcgattgatacgcaggaaacccgggaccttatccgtcaggccggagttgaaggcattacgctcctgaaaaacgaaaacaataccttgccgattggaagtgatgtaaaacgcattgccctgattggcccaaacgtcaaacaagcaatcgcaggcggcgggggatcagcgtccctgaaaccctactaccttaccaccccgttcgatagtattaccgcattaagcggcgtggagatcgtctatgcgcaaggcgcccagaccgacaaatggctgccgttggcatctaacgtttgcactaccccttcgggtaaacccggcgttgtgctggaattttataaaggggacaaatttgagggcgcgccgatgtttattcagaaccgccccaaaacagacctcttcctttgggataatgcgccgaaggaagtactgccggaatatagttttcgtgtgaaaactgtgattacaccggagaccagcggcaaacatacattcggcctgagtagcgtgggtccggccaagatgtatgtgaacggcgaactcctgatcgataattgggaatggaccgaagcaggagaagcgatgtttgaaggttcgattgaagtgaacgagtcgacgtatttagaggccggcaaaaaagtggacatccttattgaaagcaccaatgaagtccgtcctacgcccaaagccggcgaaaaaactcacggttacggcggctgtcgcattggttacatcgaaaggccggacaaagatttcattgctgaggcagcagaagtcgcagcgtcggcggatgtggcagtggtgattgtcggactggatgcggaatgggaatcagaaggctatgatcgtcagacgatggatcttcctaaggatggcaaccaggatcgcctgattgccgcggtagctaaagctaatcctcgtactgtggtcgttaaccagagtggcacgccgattaccatgccgtgggcggatgatgtcccggcgattgtgcaggcgtggtatcaaggccaggaagccggtaatgccctcgcagacgtgctgctgggcttagccaacccctctggcaaactgccggtgactttcccgaaacgcttagaggacaatcccgcctaccataactggcctggtgaacaccatcgcgtggtctatggcgaaggcatctatattggctatagacattacgaacgcgcgaaaatagagccccagtttgtctttggtcatgggctgagttataccacctttgattatggtaaaccgaccatttcaggcactattctaaccgagaataacgccctgaccatcagcgtaccggttaccaatactggctcacgtgcgggcaaagaaagtgttcagctgtatattcgcgatcccaaatcgcgcctgcctcgtccggataaagagctgcaggcctttggtaaagttgatctagaaccgggccagactaaaatcgtggatctgaaaattaacaaatacagcgtgggctactatgataccagcctctcaggttggatagccgaagaaggcgaatttgaagcagtagtgggagcctctagcgcggacattaagggcagcgtgagctttgaggttaaagaaagcttcacctgggtgttctga

SEQ ID NO: 962 - DNA, 2394 bp, Artificial Sequence
  6xHis UPI00018152EB
atgcaccatcaccaccatcatgaaaatctctatttccagggcagcatgaagctggaatataaaattccgtatcgcattgagcgtggagaacaaacgaatttcagccctttgtttattcgtattattagccaaggaggaaaacaaatggaaaaagatatcaaaaagctcatttcacagatgaccctggaagagaaagcctcactgtgcagtggactggatttctggcataccaagccgatcgaacgcttaggtattcctagtatccgtatgtccgatggtccgcatggcctgcgcaaagaagaaacaatgttctctaaaaccgtgccagcgacctgcttcccgaccgccgtcaccattgcagcctcatgggataaactgctggcagaaaaaatgggcaaagcgataggcgaagagtgtcaggccgagaatgttcagattttactgggcccgggaattaacatgaagcgttccccgctctgcggacgcaactttgagtactattcagaagacccgattctggccggcgagctggccgcccacttcatcaagggggtgcagtctcagggtgtaggtacatctcttaagcattttgctgccaacaatcaagaacaccgtcgactgacggtggatgcgattatcgatgaacgaactctgcgtgaaatttatctgaccgcgtttgaaaaagcagtgaaagaggcgaaaccttggaccgtgatgtgctcatataataaagtgaacgggacctacgcgtctgaaaacgagtttttactgacgaaagtgttgcgcgaagaatggggctttgaaggcttcgtggtgtcggattggggggctgtgaatgatcgcgttaagggtctggcggcaggccttgatttgcagatgccgtacgatggtggcaacggcgacaagaaaatcattgaagcggtgaaaagtggcaaactgccagaagaagtgttggatcgcgccgtggaacggattctgaagattgtttttaaagccatcgagaataaaaaggaaaacgcaacgtacgataaggaggcacaccataaactggcccgtgaaatcgcacgcgaatgcttcgtcctgctgaagaatgaaaataatattttaccgctgaaaaaagagggcaaaatcgcactgatcggcgccttcgcaaaaaaaccgcagattcagggaggtggtagtgcgcatgtgaatcctacacgcgttgacgatgccgttgaggagatcaaaaaactggtgggtgacaaggtggaaatactgtacgccgacggctaccatatcgagaaagatgacgtagatgagaaactgatcgaagaagccaaagaaattgcgaaaaaggcggacgtggtcgttatttttgcgggactgccggaacgttatgagtcagagggcttcgatcgcccccacatgaagatgcccgagagccataaccgtctgattgaagaagttgcaaaggtgaatagcaacctggttgtagtacttagtaatggcgcccctatcgaaatgccgtgggtagataaaccgaaggccattttagaaacctatcgtggcggtcaggcttggggcggggccgtcgcagatgttctgtttggcgtggtcaatccttcgggtaagttaccggagagctttcctaaaaagttatccgataacccgtcgtacctgttttttccgggcgaggatgatcgttccgagtaccgtgaaggcatttttattggctaccgatattatgacaaaaaagaaatggaagtcctgtttccgttcggctacggtctgtcttacaccacgtttgaatacagtgacctgaaactggataagaaagagatgaaggacgatgaggtcctgaaagtcagcgtcaaagtaaaaaacacggggaaagttaaaggaaaggaaatcgtccagctgtacgttcgtgacgttaaatctaattatatccgtccggagaaagaacttaaaggattcgaaaaagttgaactggaacctggtgaagaaaaagaagtggtgttttacctggacaagcgcgcgttcgctttctacaatatcgatattaaagactggtacgtagaggatggcgaatttgagattttgattggtaagagcagccgtgacattgtcttgaaggataaagtgttcgtcaaatcgacgacgaagattaaacgccactaccacattaactccacgattggtgacatcatgtcggacccggaagcctcagcgaaatttaaacacattctagaacagttcgcgagtgccttcccggcgttctcttcggaggaagctattatgaacttcgcggagatgatgaaatatatgccgctgcgcaacctgattcatttcggccaaggcaaattcactgaagagatgctcgaaaacttgcttaaggagattaatagttga

SEQ ID NO: 963 - DNA, 2301 bp, Artificial Sequence
  6xHis UPI000210C01C
atgcatcatcatcaccaccatgaaaatctctactttcagggtagcatggctgtcggcctagatattccgcgtctgctaggcgaacttacacttgcggaaaaagcctcgttagttagtggctcgggtttttggttcacacagccggttgagcgactgggtattccggcgattatggttagtgacggtccgcatggactgcgagcacaaccgcccggaggcggtgatcacgtgggtctgggttcaagcttaccggcgacttgttttcctactgccagcgcaattgcaagtgcgtggaatccggagttgctgcaccgcattggtcaagcccttgctcaggaagcccgcgcctgtaacctgagcgttatattgggctcaggcattaatatgaaacggagcccgctgtgcgggcgaaacttcgaatatttcagcgaagatccatatctggcaggagaattggcggtgggcattgtcgacggcattcagagctgcggcgttgggaccagcgttaaacactgggcagcgaataatcaggaaacggatcgactgcgttgcgattcacaggtggatgagcgtaccctgcgtgaaatttattttccggccttcgctcgtgttgtggagaagagtcaaccctggactataatgtgttcttataataaagttaatggcaccagcgcgtccgaaaacacgtggctgcttgacacagtgctgcgcgaggaatttggcttcgaaggcttagtagtgtcggattggggtgccgtgtaccatccggttccggctgtacaagcgggctgtgacctggaaatgccgccgagcaaaggccgttcggaagccgcaattgtagctgccgtggaaagtggtgagttatcagtggatgtgctggatgcgcgtgtacgcaccgtcttagagctggttgcaaaaggtatgcatgccttggagctggatgaaagtttcgatattgatgcgcaccatgcattagcacgacaggccgcagcagaatctgtggtattactgaaaaacgatggtctgctgccgctcactgttgaagccaacattgcggtgattggtgaattcgcgcgcaccccccgttaccagggtgcgggtagctcgcaggtagttccgacccgtttagatacggtgctggaagaactgcaaacagtttatggggaactgccattcgccgccgcatatggtgttggtgatacctcaaatgatgccgtgttgctggtggaagcagaacaggtggcggccgcggcagacattgttgtgatgctgattggtttgccggcggcggaggagagtgaggggtttgaccgtacccatctgaacctaccggacaatcaattgactgcactagccgcggttgcggaagcgaatcctaatgtcgtcgtagttctggccaatggctcaaccgttgtgttaggcgatgtgttaccgcgcgcgagcgctttggcagaagcgtggttgggaggccaagcggccggtggcggtatagtcgacgttctgacaggcgccgtcaatccgtccggtcgtttagcggaaacgattccgaaccgtctcgaagacaactcgagctatctgaattttcccggggaagagcagagcgtccgttatggcgaaggcatctttattggctaccgaggctacgaccgccagcatctggacgttgcgtttccgtttggttttggcttaagctatacaagctttgaactgtcggatatcaaagttcgtatgcgtggctctgtagccgacgaaacgctgggggctacagttgaagtaaccgtgaccaataccggggatgtggatgggagcgaagttgtccaggtttacgtgcaggacgtagtaagcaccgttgcacgccccgtgcaagaactgaaaggatttgcgaaagttgcggtgccggctggcggtgccgtccaagtctcaattgaattggatcaacgcgcgttctcttactggagcccacgttatcgtcgttgggtagttgaggcgggcgatttcgagatcagcgtcggtagtagcagccgagacctggcgttaagtcagtctgtaacagtggaagcggcgacgttattaccgccgctgactcgtgattctaccttgcaagaatggttagcagatccggcggggcgccagttagttgaacgtgaagtagctgctggacagcctggcgctgggatgcaggaaggccttttggaagttatcggcaatttccccatgaacgcattagctaacctgaaccttagcttggaccatgactccttagatcgtgtggcagccgaatgggcgggccaacagcgttga

SEQ ID NO: 964 - DNA, 2283 bp, Artificial Sequence
  6xHis UPI00028BB1B6
atgcatcaccaccaccatcacgaaaatttgtactttcagggtagcatgaccgaacagacgcatacaaaagcgaaagatctggacttacaggaggaagccagtctgacaagtggttcggattcttggcatctgcaaggactgcccgacaaaggctatgaaggctatatgatcactgatgggccgtacgggttacgtaaggcgaccgggagcgacgtatatggatcggtgccggcgacttgctttcccccgactgcgggcttagcatcgtcttggaacccggacctgacgtaccaggtcggtcaggccatgggcgaagaatgtattcaagaaaaggtggcggtgatactgggccccggtatcaatatcaaacgttcaccgctgggtggccgcaattttgaattctacagcgaagaccccgtcttggcgggccatgaagccgcgggcctggtagaaggtgtgcaatcgaaaggtgttggcacctcgcttaaacatttcgccgcaaataatcaggagactgatcgcctccgcgttagctctgatgttgatgtgcgcacgttacgtgaaatttatttgccggccttcgaatacgtggtcaaaaatgcaaaaccgtggaccattatgtgtgcttataataaagtaaatggggtcttttcaagtgaaaatcgttggctactgactgatgtactgcgcggggaatgggggtaccaaggcatggtcatgtctgattggggtgcggtacacaatcgtgtcgatgcactgcaggcgggtctgaacctagagatgcctccgtcacgtaccgacgaccaggttgtccaggctgttcaagcgggaaaactggataaagaacagctcgatcgcatggcgcaaggcattcttgatctgattgataaagcgcgcccagccatgtctcagcagggatatcgctatgatgttcaggaacataatgatatggcgcgtcgtgcggcacaggaaagtattgtgttgctgcgtaatgaggaccgaatattacctctggatccgcaaaaaaaagtagccgtgattggtgaatttgcgcgtactccgcgctatcagggcggagggtctagccacataaccccgacagaggtgagttctgcattagacggctttaaagaagcgggtatgaacgtagacttcgcgccgggctttaccctggatgagaaagaacaagatccagccctgacccgtcaggcgctggaagttgctcggggtgcagataccgtggttctgtttctgggccttccggaatatgccgaatcagaaggctttgacaggacttctatggatcttcctgaaaaacaggttgcactcttgaaggccgtctctgaagttaacgatcgtgtagttgcagtactgagcaatggtgcggtggttaccgtagccgattggatggacaaaaccaaaggcttgttggaaacctggctcctggggcaagaaggtggcagagcggtcgtcgatgttctgaccggcgcagccaccccaagtggccatctaccggaaacgattccagtccgtctcgaagacaaccctactattacgagcttcccgggggaagaaggtcacagtcgctacggcgaaggtgtttacgtcggctaccgctactatgatacgttccagcgtcccgttgcgttcccgtttggcttcggactctcgtatgccgattttgccctggatcaggtagcagtaaccaaaaccggcgctagctcggctcgcgttgaagttacggtgaccaatactagtcaagtggatggcgcgcagactgtacaagtttacgtggcaccgtgcgcaagccgtgtaaaccgtccgtcgcacgaactgaaagcgtttacaaaagttttcctaaaagcaggtcagtcgtctcgcgtgagtatggacctgacagaacgtgactttgcttactggagcaccgcgatggatgcctggcacgttgaggccggtacctatcgcatccaggttggtacatcaagtcgtgacctcgttgccgaagaagatttacaggtagacggtgatggccggtttatccccctaaacgcagaaagcaccatggccgagtggcgtgaaaactcaattggtggtcccattatgcgcgaccgaattgatcaggacgggattcccttgccggatgatccgaatacggcacagctgttcgatacaatgccgctggcgagtgtaatcacgctgagtggcggcgacgggaatggtatcgttgcggatatggtggaccgctatcatcaggccctgaaacagcaaggacgcgattcttga

SEQ ID NO: 965 - DNA, 2616 bp, Artificial Sequence
  6xHis UPI00035AE576
atgcatcaccatcaccaccatgagaatctgtatttccaaggttcaatgttagacgaatctgtgagtcgcgaaattgaggagaccctggctcagttaacgctggaagaaaaaattagcttgttggctggcaaagacatgtggcgtaccgtgccaattcccgataaacaggtgccgagcatcaaaacctccgatggcccatccggtgcacgtggcgattcgtttacgggaggcaccaaagccgcattttttccaagcggaatctctatgggggccacctttaatcctgaacttgcgtacgaagtgggccagtttattggtgatgaagtaaaaagcaaatcggcaagtgtgttgctcgccccaacagcctgctgtcatcgtagcccgttggggggtcgtaacttcgaatcatactcagaggatccgctgctcagcggcaaaatggcgtcggcctatattcgtggcgtccagtcaaagaacgtggcagcgactatgaaacactacgcggccaacgaacaggaaacatggcgcctgcatgtagatgagaccatcgatgaaaccactttgcgagaaatctacctgaaaccgttcgaaattgccatgcgtgaaggtcgcccgtgggcggtaatgagcgcgtataacattatcaacggcgaacattgtgatagtaacagtctgactctcaaacaagtccttcgtggtgaatggaagtatgaagggttggttatgagcgattggtttggatgcaattcgatggttgattctctgctcgcgggacttgacctggaaatgccgggtccagcaaaagtacgtccggtgaaagaactggtagcgaaggcagagaaagacgactctattcgtgaagcggttgataaagcagctcgccgcgtcctcacgctgattgcgaaggtgggaaaatggaaggacatgaccccagaggcaccggagatttcgcgtgaagatcccgaaacaggcaaactaattcgtcgcgcaggtggggagggagtagtactgttaaaaaacgacggcgcgttacctctccaaccggcgtcgcttaaaagtattgcgtttgtgggccctaatgcgaaagcgacagtcgcgggcgggggtggctctgcaaacctcaatccgaattatctgacccagccttacgaaacttttgtaaaagccattaaagaaatcgacgcctcaatagaagttccgtacgcacagggttgcattatcgatcgctggattccgccggtcaatgccgaatctggtctttgcaggtcagggggaccaggtagcgagccgggatggctggtggaatggttccgcgggcacgatctgaaaggagaagtcgttagttcaagcgtgtttaaaaacagcgatgtatttctgtgggacggacgtcccgaaggcctgaacccagcggaaggctattccattcgcttcagcggacaggtatcggttccagaagacggtaactacaacatcgccctcagcacgattaccgctggcaatctgtacgtagacggtgaactcctgatcgacaattgggacttcaaagagcgtggtaacctgatgatgaacattggttctgaagaagttgtgaagacccttgaactgaaaaaagggcagtggtacaatattgaagtacggaacgccagcatttggccgaaagattctccgcgtgacccgcctatggaagagattggtgcgcttggagttcgccttggactggctgcggtgtatgataacaatagcctaattgcccaggccaccgattctgtgaaaaattccgatgcggtggtcattgtcgtcggcttaaataacgaatgggaaagtgaaagctatgaccgtacccagactaaacttccgcgtaaccaggatgagctgattgaagaaattgcaaaggtaaacaaaaatgtgatcgtcgtgaatcagagtggagctccgatagatatgccgtgggtggaaaatccaaatgtcaaaggtatcattcaggcgtggtatgccggacaagaagccggcaacgtgattgccgacgttcttctaggaaaacagaacccgtcaggaaaactcccgcttacgttccccgtgaaactggaagataaccccagttataattatttcccgggcaaggacaaaaaagtggagtacactgaaaaactgatggtgggataccgctactatgataccgacaacgttaaaccgcgctttccgtttggatacggtctgtcgtattctagctttaaagtgggcaaaccggtgctctcgactactgagttaagtgaagatggctcgtttaccgcaacggtggaagtaagtaatacttctgccgtggcgggcgccgaagttattcagctgtatgtccagcgcaaaaccagcggcacctcgagtatcaaacgaccgatcaaagaattaaagggcttcaaaaagatccatttgcagccgggtgaaaccaagaccgcagaggttaccgttgacgataaatcactgggcatatggagcccggaagcgggtaaatgggtagtggaggccggcgattatgaagtgctggtaggcactagctctgtgtacgatgaattggccgctgccggtaccgtggttgctaaaagcgcatggagttggatctga

SEQ ID NO: 966 - DNA, 2574 bp, Artificial Sequence
  6xHis UPI0003F2D7DD
atgcatcatcatcatcaccatgaaaacctgtacttccaaggctcaatgagctcgtctgccgagattgaagagattcttgccaacctgacactacaagaaaagatcagccttcttgccggtggtagcccgtggtgtacttttcctatcccgtcaaaaggggttccggttgcgaaactgtcggatgggccgaatggcgctcggggcaaaagtatttatgatggtcctaccgccgcatgctttccagcggcatgtagcattgcctcttcgttcgatgttgacttagccaaacgtgttgcgaccgctctggccgaagaaaccctgactaaaggcgctcgctgcatcctgtctcccacggtatgtattcatcgtcacccccttggtggccggaactttgagacctttagcgaagatccgctcctgacaggacagatggcaattgcatcggtgcagggcctgcagagtaaaggcgttagtgcgacggttaagcacctagtagccaatgagcaggagaccgatcgcctgacagtgaacaccgagctgagtcagcgcgccctacgcgaaatttatctgaaaccctttgaaatggtcgttaaaagcgccaacccgtgggcaatcatgacatcgtacaacaagattaatggcacccacgcggatagccatgaaccgctgcttaagggcattctgcgtggtcagtggaattggcaggggcttgtcatgagcgattggggcggtattaattcactggcggattctctcaacgcgggtgtcgatctcgaaatgccgggaccagctcgttggcgcacaaacgaagcagtattagatgccgtcagccgcggtgaggtcaccgaagctatcatcactgaacgtgcccgcaacgtacttacttttcttaatcgtctgaactgctttcaggatccgaattggaaagaaccggaagagaaagcaattgatcgaccggagcatcgtgccttaatcagagaggccggggccaaaggcatcgtactgttgaagaacaccaacgatattcttccccttaccaaagaaaaagtgaaaggccgcaaaatcgctgtgtttggatatgctaaagaatgtttagcacatgggggtggcagtgccagcgttaacccacattatcgtgtgaccccatgggacgccttatgcgaagcgtttgctgatgctgacgttgaattcgtattcgcgaaaggtgcacatacgtttcgccaactccctgtgctgacaaccgaagtggtggggctagatgggtcaccgggattttcgttgaaaatttttgaaaccggcgcgtctgaaccgatgagcacatcgcacggatttgcgaaatctgagctttcattgctcgatggtcatgcattagaggataaagtcgtagaaattgtaggtttcctgagcctgtctaaaccgggcgtgtatcgcgttagcctggcgggactcggaccaactaaattactggttaatggccgcattgtttttcatcaggtcgaaccctgcctggacgcaatggcatttctgtttggcggctcgcccgtgccggaattcgaactggatctgtcaaaagatatgaaatatgaaatccgcattatcagtgcaccgctgcaatccacagatggtaaggatcttggttttctaaaaggacagacaggcatgcgtctgggctttatgtcgatgacggaatatgataaagatttggtcagcgaagccgttgaactggccagctctagcgattactccatagtcttcacaggtaacgacccgatgtgggaaaccgaaggccaagatcaggcgtcatttaatctgccaaaacaaggtagtcaggaccgtttagttgaagcggtggccgctgcgtgcccggaatcaacgattgttgttaacagcaccggtgttgcggtagctctcccgtggctggatcaggtagctgcgctgctgcaagcgtggttcccgggtcaagaagcgggccatagcatctgtgatgtactcaccggcgctcagaacagcgagggccatctgacctgtacctttatgaagcagctggaagactgtccggcgtacgggaacttccctggcgatctggacgaccaacaaaaaagagaagtaaactactctgaaggcgtgttcattggataccgccactttgaccgcctgccgcgtgatcgcattaattttccctttggtttcggcctaagctatacgaaatttgatctggcgctgagcaatatctcccaaattaccgaggagaaatatctggtgcacgttcgtgttagcaacatggggaatgtagaaggcgcgattgccgtgcaaatttacgccgggcgtaaagatagcaacccggaagatggtccgattcaagtgctggttggttttaaaaaagtccgcttagaaccgcaagagtgtgccagcattgatattccgatgtactgccgtgatttggcgtactgggacgaaaaaacgggttattgggttctggatggcggcgaatatgtcgtacatgtaagcaagtctgccggcgaaccgatcgtgtcctttgtggtatccctgcgccagagtacgtatgcaccgtga

SEQ ID NO: 967 - DNA, 2304 bp, Artificial Sequence
  6xHis UPI0005067FF9
atgcatcaccatcaccatcatgaaaacttatattttcagggtagcatgagtgaatcgacatatccgtctgtcaaagatctgaccctggaagaaaaagcaagcctgacgagcggaggcgatgcatggcacctgcaaggggtcgaagccaagggcattcctggctatatgatcaccgatggcccgcatggactgcgtaaatcattgacaagctcaaccggtgagaccgatctggacaactccgtgccggcgacctgctttcctccggcagcgggcttgagcagttcctggaaccccgaactcatacacaaagtcggcgaagccatggcggaagagtgcattcaggaaaaagtcgcggtgattctgggcccgggcgtgaacattaaacgtaatcctctgggtggacgttgctttgaatactggtcagaagatccgtatctggcgggtcatgaagccattggaatagtggcgggcgtccagtccaaaggtgttggtacctcattaaagcactttgcagcaaacaaccaagaaaccgaccgtttacgcgtggatgcccgcatttcacagcgcgcgttgcgtgaaatttacctgccggccttcgaacacatagttaagactgcgcaaccctggacgattatgtgcagctataacaggattaacggagtgcacagtgcgcagaatcattggctgctaacagatgtactgcgcgatgagtggggctttgagggcatcgtcatgagcgattggggagccgatcacgaccgcgtggcgtcgctgaacgcaggcttgaatttagaaatgccgccgtcctatacggacgatcaaattgtgtacgccgcccgtgatggacgcatcgcgccggcccagctggatcgcatggcccagggcatgattgatttgataaacaaagcccgtgcggctatgagcattgacggctatcggttcgatgtagacgcacacgatgaagtcgctcatcaggccgcgatcgaaagtatagtcttactgaagaatgatgatgccatacttccgcttaacgcggatccggccgcagcacgcaaaatcgcagttattggggaatttgcgcgcaccccgcgttaccagggagggggcagttcacacatcaccccgactaaaatgacctcatttttagatacactggccgaacgtggtattaaggcagattttgcaccgggctttacgctggacatggaatcggctgatccagcccttgagagcgaggcggtggagacggccaaaaacgccgatgtggtgctaatgtttcttggcctgcctgaagctgccgagtccgagggttttgaccgggatactttagacatgccagccaaacaaatcgccttgctggaacaggtagcagccgcaaacaaaaatgtggtagttgtcttatccaacggctcggtgattaccgtggcaccctgggcgaaaaatgccaaggggatattagaaagctggctgctgggacaaagtggcggtccggcgctagcagatgttatttttggtcaggtttccccgagcgggaaactggctcagagcattcccctggatattaacgacgatccatccatgctgaattggccgggcgaggaaggtcacgtggactacggtgagggcgtgtttgtcggttaccgatactatgatacgtacgggaaagtagttgattatccgtttggttatggtctttcatacgcaactttcgagattgccgatgtcgcggcggcgaaaactggtgcgaataccgcaaccgtgacagcgacagttacgaatacctctgacgtggacgcgagcgaaaccgtgcaggtttacgtagcacccggtaaagcggacgtcgctcgaccgaaacatgaactgaaaggcttcaccaaagtgtttctgaaagcgggtgaaagtaaaaccgtgactatcgacttggatgaacgtgcctttgcctattggagcgagaaatataacgattggcatgtcgagtcaggcgaatatgcaatcgaggtgggcacaagtagcagagacattgcagaaactgttaccgttgccctggatggcgatgggaaaacccagcccctgactgaatggtcgacgtatggagaatgggaagcggatccttttggcgcaaaaatcgtagctgcggtggcggcagcaggtgaagctggtgagttgctgaaattaccggataacgccatgatgcgtatgtttttgaacagcatgcccataaattcgctcccgacgcttctgggtgaaggtggtaaaaaaattgcacagtttatgctagatgaatatgcgaaactgagcaaatga

SEQ ID NO: 968 - DNA, 2313 bp, Artificial Sequence
  6xHis UPI0004105550
atgcatcaccaccaccaccatgaaaacctgtattttcaaggttcaatgtctgaacagactagttcgtcgacttatccgtcagttaatgatctgtcactggaagaaaaagcgtcactaaccagcggcggtgatgcctggcatttgcaacctattgaggagcgcggcattcccggctatatgattacagatggcccgcacgggcttcgtaaaactgcgggtgatacaggcgccattgatctggaacatacggtgccggcaacctgttttcctccggccgccggtatgtcgtcaacctggaatcctgagctcgtggaagaagtgggccaagcaatggcggaggagtgtattcaagagaaggtggccgtgattttgggccctggagtaaatattaaacgtaacccgctcgggggacgttgtttcgaatattggagcgaagatccctatctggccggacatgaagcggttggcatcgtgaaaggcgtgcagtctaaaggtgttggcacaagtcttaaacactttgcggttaacaaccaggaaaccgaccgcctgaggatagatgcgcgtgtgtctcaacgtgccctgcgcgagatctatctcccggcctttgagcacatcgtaaaaaccgctcagccgtggacggttatgtgtgcgtataaccgtattaacggcgtctacgcggcacagaaccgttggctgctgacggacgtccttcgcaaggagtggggttttaaagggatcgtgatgtcagactggggtgcggaccacgatcgcgtggcaagcctgaacgctggcctgaacctggagatgccgccatcattcactgatgatcaaattgtatcggcggcgcgtgatggccgtattagccctaaacagctggatgatatggcacagggcatgatcgggctggtcaacaaaacccgtcaggcaatgtcggttgaagattaccgctttgatgcgcaggtgcacgatgatattgcacgtcgagccgcggccgagagcatggtgttactgaaaaacgatgagcatatcctacctttaagcaaaaacgcacgtgttgcagtgatcggagagtttgcgcgtacgccccgctaccagggcggaggttccagtcacatcactcctacccagctgacgtctctgctggatgcactccagcaacgcggcatcgaatatgacttcgcaccgggtttcacgctggaagatggcgaacaggaacaatcgctggtggacgaagcagtgaatatagcgtcgaaggccgatgcggtagtaatgtgtctgggcctgccggaatatgccgaaagcgaagggtttgatcgtacctccctcgacattcccgcaaaacagttagaactgctaagtaaggtacgtgagagtaatgcgaacgttgtagttctgctgagcaacggcagcgtcgtcagcctgactccctggcaagaccaggcgaaagcagtagtggaaacctggctattgggccaatccgggggtggcgctattgccgatatgctgttcggcgatgtgaatccttccggtaaattgagccagactattcctctgaacatacttgatgatccgtcgatgttaaactggccgggcgaagaaggacacgtggattacggtgaaggagtgttcgttggttaccgttactatgacacatacgccaaagaggtcgcgtaccctttcggtttcggactgtcgtacagtgacttttctattgacaatgtttcggtagaacgtacgggtgccaatactgcatgtgtccgagcgaccgtgaccaacgtgtcacaaaccgctggcgcccaaactgttcaaatctacgtggcgccgggccgctcagaggttgctcgccctgttcacgaactgaaaggctttgccaaggtatttctggaagccggtgaatcgaaagaaatcagcatcgacctcgatgaacgtgcatttgcctattggtcagagcgtttcaacgactggcatatcgaggcaggcacttatgggattgaagtagcaacgagctcgcgcgatattgtggagcgtctggatattgaactggaaggcgatggcaaaagcctcccgctcaacgaatggtctaatatgtcggaatggcgcaaggatccggtaggcggtccgatcgtcaaacgcatgtttgaagagggtcgcgatggacggattccggcgctgccagaaaataacctgggcgcggaactctttctggatgcgatgccgattaactctatgagcgttctgcttggaaaagacggaaaagtgctcacccagtttctgttggatgaatacgcaaaagaaacagacggtcttcattga

SEQ ID NO: 969 - DNA, 2565 bp, Artificial Sequence
  6xHis UPI0005BF9DF9
atgcatcaccatcatcatcatgagaatctctattttcagggtagcatgggcagctatagcggttcgcaacagggttttgagtcgattatcagcggtctgacagtggaagaaaaagccaccttgttgagcggcgcggacttttggaccacaagtccagtgacgcgtgttggcatcccagcgttaaaagtttcagacggccctaacggcgcacgtggcggtcacttccaaggaaagactacgagcgcatgctttcctgcgagtgtaagcctggctgcgtcgttcgatcgcgaatttgcgtataaaattggcagagcacttggccaggagactaagacgaaaggcgcccacgtactgcttggtccgaccgtatgtcaccaccgtgacccgcgtggaggacggaacttcgaaagctttagtgaagaccccttacttgccggcgaactggcatcagaatggattgcagggctgcagtcagaaggagtgggggcgactgtgaaacactacgccgtgaacgaacaggaaactagacgctttacgattgatgcgcgagtggaccaacgcgcgctgcgcgagatttatctgaaaccgtttgagattgcggtgaaacgtgcggacccgtgggctataatgacttcttataacctggtgaacggcaaacacgccgacgaacataaggaactgatcaccgacattctgcgtggtcaatggggcttcaaaggcttggtgatgtctgattggggtgggaccaattcagttgccccatcgctgaatgcgggtcatgatttagaaatgccgggcccgccactcaaacgcacagtggacaacattcagagagctctgcagacaggagaactgacggaagacacactgaatcagcgtgtaggtaacgttcttaaactgttacagcgcgccggtaaattcgagaacccggaaattgcagaagaacaggccgttgatcttccggaacatcgtagcttgattcgccaggctgcggcagaatcaatggtcctgcttaaaaataccaataacatcctgcccctgaaatccaccaatacaaaaagtattgcgctgctggggctcgcacgcgaatatttaggtcatggcggtggatcggcctccgtgaatagtcatcataaagtcaccgcgtacgaagcgctgcaagcggccgtgggttcgagcgttcagcttaattatgcggagggcgcccgtatcgtccgcaacctgtcgcccttaagtgaaaacgtctacaatgaagagggcgtaccgggtttcaccatgaaaaccttttcgaaacttaatggtgacaatccgacggtgtcaaccgtacctagttctgtgtatcgcaccttagaaccgagtagtattgatcaaatgacgcttctgggaaccttcaagcccaaaacatctggcctgcattatatttcgttatctaccctgggcggcacacgcgtttatatcaatgacgaactcgtctttgattacagcaacagccagaccaccgatatcatggcgtttttaattggtagcccgggagaagataagaaacgctatctgtttaccgccggtgagagctatcgcatccgcattgaggctaaagcaacaaaagacaccattagcgggtttagtctttttaccaaagaagccatcggcttcagtttagggttcgcgctggaaagtgaacacgacgctgacttgttaaccgccgccattgaagcggcgaaaagctcagacgtggccgtcgtatttgttggacatactccgatttgggaaagcgaaggagctgatcgctcgggtatggatctcccgaaagacggctccctggatgccttggttgtggcagcagcaaaggtgaatccgaatactgttgttgttaactcgactggtagtgcgatttctatgccgtggatcgaggacgttgccgcagtggtacaagcgtggtttccgggacaggaagctggccattctattgcggatgtcctgttaggtaaggtgacacccagtggcaaactccctgttacgttcccgcgcgccatcaccgacgtgccgtcttatgaaaacttcccaggcgacattaaaaacgaggtagtacactataaagaatcaatctacaccggttatcgccactttgatcgtcgtccggaaggtgtactgtttccgttcgggtttggactgagttataccacctttgatgtggttgtaacgagcgtcagccgcaccaagttacgcaatcatgaaaccctcaccgttagtgcggatgtaaccaacaccggcactacggaaggtgcagaagtcgtacaggtttatgtaggagcaggtgaaggcacctccgcaattgaccgcccggcgaaagagttagccggcttcgcaaaagtgcacttacgtccgggcgaggcacgcaaagttgccattaccttcggtcgcgatagcgtagcctattggaacgaatctcgtgataaatggtcagttgacaaaggggcgtatacaatctacgtagggacttcgtcggtggatattgcgggcaagctggaagtggaggtgccggaagcgtttgacttcgacccatga

SEQ ID NO: 970 - DNA, 2616 bp, Artificial Sequence
  6xHis UPI0007CE7DBA
atgcatcatcaccatcatcacgaaaacctgtatttccagggctctatgcagctgagcgagatggcattaaccggcgtagaagttgatgcaaccgacgttgaatatatacttaaacagatgagcctggatgaaaaaatccagatgctggccgcgaagaatgtatgggaaacgcctgaaatagagcgtgtaggaatccccagcctgaaagtgacggatggcccgaatggtgcacgtggaggcagcttcttcgatgggacgaccgccgcctgcttcccagcatcggtgtctctggcagcgacctttagcagggaactgagccggcaaattgggactgcgctcggtcaagaagcgattacaaaaggggcgtacgcggttctggggccgaccgtttgctgtcatcgtagtccgctgggtggccgtaacttcgaggcgtttagcgaagacccgtatctgtcgggcacccttgcctcggaatacgttcagggtctgcagcaggaacgcgtagcagccaccgtaaaacacttcctagcgaatgaacaggacacgcgtcggttcagtattaatcagacaatctcggaacgcgcactgcgagagatctaccttaagccctttgagatggtggtaaaagaggccaaaccgtggtgctttatgtctagttatccgaaaattaacggcaagcacgttgacgcgcaatcattattcttagaagatattctccgcaaagaatggtcatacgatggcttggtgatgtcggattggggcgcgacttccaccgtggaaagcgtttcatacggcttagatctagagatgccaggtccaccgcgatttcgtactccggaggccgtccaccaggccctgctgaaaggtacggtcagcgaaagcgatatcgatgcacgggtactgaccacccttaagttactggaacgagtggggaaatttgcggatcgacgcgataccccgaaagagactgcggttgatcgtccggaacaccgtgaattgattcgcaaggccggttctgagggtattgttctgctcaaaaatgaccggggaatcctgccgatcgatgttaccaaaaccaaaaaagtagcactccttggaccgttagccaagtacgcggcggcgcacggaggtgggagcgctagtcttaattgccattacaaagtctctccgtttgacgcattcaaggatcgcctctccgaagatgttgaaattgcgcatagcaaaggcgcgcacattttccgggtgtaccccgatctggaggaaggctgtctcaatgcacgacagcgtccgggcttcttagcggagtattttatgacaagccgggtaacggaagaaccgtttctggtggaacaattcccgcgcggatctttcactaccctgatgaacacgcgagccaccgggtgcaaaaccgtacgcttcacgaccacctatagtcctgtgaccccgggagcgcactatttatcgttctcgggtttaggtccgagcaaattttatattaacgatgaactagtggcacaccaaaccgagagcaccaaagacgctatgggtttcctgctgggggtccaagaagaaattcgcacccagttcgtgttcgaagtgggcaaggaatataatatcgtcgttgaaacgcacccgtcaccgaccagcaatgcggaattgtacctcctggataatcagtgcagcgtccaccttggcctaatttcgcaagaggagatggaacaagatgtattagcggaagcagttagcttggcgaaagatgcagatctagcaattgtcttcgttggaaacaccacccagtgggagactgaaggacaagacctggaaagtatgagcctgcctgcgaacggcagtcaggatgatcttattgtgcgcgtagctgcggccaaccctaatacgattgtggtaaatactaccggagtcccggttgagctgccctggattgacagtgtgccggcctttcttcaagcgtggtacgctggccaagaaacaggtaatgcgattttggatgtgttattgggtacaacctgtccgtccgggaaactaccaatttcgtggcctaaaaaatatgaacataccggttgctttggaaatttcggtctggacagctttgaaagccgccaggtggattacgtggagggcgtattcgtgggttaccgttggtttgacaatttgtggggcggcgagaaggaagttcggttcccgttcggcttcggccttagctatacgacctttgaaatcaccggtaccagcattaaaggttctctgagcaacgacgcgcatcacgtcttacgtgtttcgatcaaagtgaaaaatgttggcaaatgcttgggcgcagaaatcgtgcaagtgtatctgaaacccccggtgaccgaaggcctcgaacgcccgcaaaaaaccctggcgggtttcgaaaagattgaactacgcgtgggcgaagagcgggaagtccacattgcgattggaaaggaaaatgccgccttttgggacgagaatctgagtaaatggcgcgtgtcaactggtgtttatgaagtgctcgttgctacctcttcccatccgcgggattgccgagcggtgctggaaacggtagtggaagacgaatttatctttaaggcgtga

SEQ ID NO: 971 - DNA, 2499 bp, Artificial Sequence
  6xHis UPI0009CDA3F1
atgcatcaccatcatcatcatgagaacctttattttcagggtagcatgcctgatcttcaagaacttttgaaagaactaactttagaagaaaaggccgccctgtgttcaggcgttacctcgtggcaaaccactccgatccgcagattagggattcccagtatcttcatggccgacggtccccatgggatcaggagggagatcgcgggcaaaaaggttgataatatttctgggagctcgattccgtctacgtgtttcccaccagcggtgaccctggcgagctcgtgggatcgggctctgttgtgcgaagtgggacaagccttggcggaggaggccaaagagcagggagttagcacgatcctgggtccgggaattaacatcaaacgcactcctctgtgtggtcgtaactttgaatacttcagcgaagatccggtacttacagcggagatggcgattgcttatgtaaacggtgtacagaacaacggagttggggtgtctctgaaacattttgcagctaatagccaagaatacatgcgtctgagtgcgagtagcgaaattgacgaacgcaccctccgcgagatttacctctacgcgttcgaaaaaacggttaaagaggcgaagccatacacgctgatgtgctcatacaatccagtgaacggcgagcatgcgagccagaacaaaaagcttctgaaagacatcttgaaagatgagtggggtttcgagggtatcgtcatgagcgactggggggccgtcgatgatcgagtgaaaggcatagacgcaggcttgcatctggagatgcccagcagcaatggcatccgtgataaatggattgcggacgcggtgaaagaaggcaaattgtcggaggatcgtcttaacaccattgtgtacgaactgttggaatatatttttaaatgtcatgaaaacacgattaacgccaaaggcttccaggcggactatgaaaaaaaccacgagattgcacgtaaagcggcagccgaagggagcgtgctgttaaaaaatgatggcattctgcccctgaaaaattttagcaatatcgccgtgatcggtgcactagcagattcaattcggactcagggcaccggttcttccaaactggagccccgcaaaaaagtgtcattcctcaacgccctggacaacgctaatatcaattacagttacttcgccgcttacgatcccgacacggatgaaacggacgaaatgagcttacgctatgccgcggaactgtcgaaaggttcggatctggtttttctgtttatcggccttaccgatcaatatgaaagcgaagggttcgaccgcaatacgctggacattccttttagccatactgaactgctcgaacgtgtgacgagcaacaataaaaacgtgattgtaattttaactgggggcagcccgtcaattatttcttacgaaaataaggtgcgtgcgattctcaacgtgtatctgacgggtgaagcgggcggagaggcggttctagatctaattaccggcaaaattaatccgtgcggcaaactggcggaaacctttccgatttcgctttctagtaatttggccagcaaatattttgccaaggaagttgctgaatatcgtgagggtatttttgttggttatcgctattatgattcagctaagaaagatgttaaatatccgtttggttatggcctcagctacacctcatatgaatatgcgaacctggttatcagcccctacaaagaagacccaaaactgacctacctcattagcttcgacgtgagtaacaccgggaccatagcgggtaaagaaattgcacagatttacgtcaaaagcaagaatagtcacatctttaaagcggataaagagcttaaaggatttgagaagatttatatcgagccgggtgaaaccaagacggtcaaagtgtttttaccgaaagaggcattccagttcttcaacgttaatagcggcaaatgggagattgagactggtgaatacgaagtcatggtgggcgcctcaagccgcgacattcgcctccgctccgacatttatgttgatggcagcgccatgaacatccctgattattccacgattactccgagctactacagcttaagcaacattgatgatatcccgctggatgaattcgaatctctcctcggtcgcaaagtaaatcgttatattaaacctggcaaaggcgagtacaccttcaatacttgtgtcaacgaattcgacgctacgtggtttagccgttggttcaagaagttcaccgtccggaactcaaagattctcttaccacgcaactcgaccccggccgagaaaaaaatggtggttaatggcgcgttagcatttccagtgcgtaacctgttcgcaatgtccggcggcgttgtgacgtataaaagcagccttggtatcttaatgatgtttaacggacacttcttccgtggcctgtttaaactgatttcgggttttttccgtaaagatattccgaagaaggaaatctatcctttggactga

SEQ ID NO: 972 - DNA, 2061 bp, Artificial Sequence
  6xHis UPI000D5A9E68
atgcatcaccaccaccaccatgagaatctgtactttcagggaagtatgaacagcaacgtatctcaacgggcactgcgcgaaatttatttaaaaccttttgagatcgcagtaaaggcggcaaatccgtgggctgttatgacaagctataaccttcttaacgggactcatgctgatatgtcgaaatatcttatacaggatgtgctgcgtgaacaatggggctttaaaggactggtaatgagcgattggggaggcactaactcggcaaccgaatcactattggcggggctggatttggaaatgcccggtccagctaaccaccgaaaaattcctgatattaaggcggccatcgaatcaggcaaactgtcagaacaaaccattgacgaacgggtgctggcggttctggaacttgttaaaaaggcggggaaatttgaaaatcccgaggaagtagaagaacaggcaattaatcgtcccgaagaccgtgcgttaattcgccgtgcgggtgcacagggggcagtcttactgaagaacgaaaacggcaccttgccgctgcaggcggaaactgtcaaaagtattgccatgctgggcttagctaaagagagcctggcacatggaggaggaagcgcggcagtgaactgccactataagattaccccatacgaagcgtttaagtcgcgtctgggtgataccgtggacctggcttacggccagggcgttcatacctttcgtaccctgccgatcctgcaagaaaatctgctaagtaaagacggcaaaccgggcttcaccctctcgcgctttcagagtaaggacacgtcagcggtgcctgaatcagtagactcatgtccgcgcggcaagtggctttcggatggcacgccttgtatcgcagcaaaactggaaggtaaattttgcccgtcagtgtcgggcagccattatctggcgtttagtagccttggtcctgcgacggtgatcatcaatggcaaaaagatctttgatgtgaccaaatatgacgatgatgcaatgcgtttccatcttgggggctcagttcaggaacaggtgcaaattgagtttgaaaaaggtaaggaatacgaaattattgtagaggcgtttgggctgcctacaggtgatgaggtgtttaccctctttcgtggcctgatcggtgttcagctcggcttcatgttgcaagaagaatatgagcgtgatattctcacagaagccgtggaagccgcaaaagcagccgaagtagcggtggtatttgtgggcaacaccaccgcctgggaaaccgaaggccaagaccagccctcgatgaacctgccggttaacggctcacaggatgggttaattagcgcagtggccgcggtgaatccgaacaccatcgtcgttaactccacgggcgtagccattgcgatgccgtggctgagcagcgttaaggccgttatccaaagctggtttccaggccaggaagcaggcaactccattgcggacgtcattttcggcaccgtgaatccctcaggtcgcctccctataagcattcccaaaactatagagggtactccggcgtatggtaattttccgggtgatatggaaagcctgcaagtgcactatcgcgaagatatttacattggttatcggtttttcgataaacaccccgagaaagtgcaatttccgttcggttttgggttatcgtacacagacttcgagatccgtaccaccctgcagaaacaaagtgtgctctcgaaagaaaacagtattaacgtgcatgcgtccgtcaagaatgtaggcgccgtagcgggtacgcacgttgtgcaggtttatcttgccccctcgaataccaacgatcgccctgacaagaccttggccggcttcgtaaaagttaatctgactagtggggaagaaaaagccgtgacaattaaagtaacatatgagagtgcagcgatttgggatgagagcgcagggttatggaaggtcctgatgggcgattacaagttactgattggaagcagctcccaggattttgccggcagtcaaacatttgttgtggaggaaaccttcacctatcagccctga

SEQ ID NO: 973 - DNA, 2625 bp, Artificial Sequence
  6xHis UPI000F7330CD
atgcatcaccaccaccatcatgaaaacctttacttccagggctccatgaccgtgtctccgctgccgaaagatctgcagaaaaaggtgaatgatgtcctcgatagcttaacacttctggaacaggtatctctccttgccggtaaagatttttggcgtactgtggaaattccgggaaaagtgccaagtataaaagtgaccgacggtccgagtggtgcgcgcggtcagtttttttcaggcggcacgaaagcggcattctttccatccggggtcagcctggcggcaacgttcgacccggaactgattacccacattgggaatgcgctggggcaggaaacgaaaacgaaggcggctcaggtattacttgcgcctaccgcatgtaatcatcgcagtccgttagggggccgtaatttcgaatcctttagcgaggatccctacctgtcggggaagctggccgcctcgtatatctctggtgtgcaggccgaaggtgtggccgttaccatgaaacactttgtggcaaacgaacaggaaaccaaacgctttagcgtcaacgaaattatcgatgaacgcgcactacgcgaaatttatttaaaacccttcgaaatagcggttcgtgaagcgggcccgtggggtattatgtcaagctacaacaaagttaacgcgcatcatgccgaccttcacccgttttcgatgaaacaggttttgcgggcggaatggggctgggatggcctagtaatgagcgactggggcggtaccaattcaacggcggaatcgctgatagctgggctggacctggagatgcctggcccgacgcggcgtcgtggcgaattgctcctgaaagccgtacaggacaccaatagcagcccggagctcttagccgcgattaaaaccggcgcacgacatgttcttgaactgatcgcacggacgggccggtggggaaaattccaggaagcagaggagcaggcggtggataaactcgaacaccgagagctgattcgtaagaccggtgcgcatggtatcgttctacttaaaaatgagggcgctactctgcctattaaacgcgagcagattaaaagtgttgcgtggataggcccgaatgcaaatgaaaccatcgcgggaggcggagggtccgccaacctgaacccgcattatctgaccaacccattagagtcgtttactgcagccgtcgaagaaaacgacatcaaagttgcgtacgagattggatgtcaaacagaaaaatgggttcgcgtattccctgttgaagagggccgggcgcgtactgcgcctagcgcaacggaaggagcgcctggcttaaaagttgacttctttggcggccgcgaatgttcaggcgagtgcgtggcgtccaatgtgatgaccacctcgaatatctttctgatggacggtaagcctccggttttgggtgatcaagactacagcgtgcgtattacgacctatattcgccctgaagcgacgggcgaacacgtagttggtgtgggatcaattggccccacgaaaatttacgtggatgacaaactgctgatagaccacacccattggattgagctgggtgagctgttctttacctcggggagcgaagaggtaacacagaagattcatctggaagccgggaaatggtacaaactggtggccgaaacaacctcaaaatctcccgagcagaaactcccggatatggggaatgataacctggattttgccagcgcgattggaattcgtcttggtatcgacgccgtgcgcgatgtacaagagtatatcgatcgcgcagcgaccttagccaaaaaaagcgatgtggcggtagtggtggtcggaatgaacaacgaatgggagagcgaggggtacgatcggcacaccatggcccttccgggcaaacagaatgaacttattgaagccgtggtaaaagcaaaccctaacactattgtcgtgaaccaatcaggttgccccgtgactatgccgtggctggatcgtgtgccggccgtgttgcaggcttggtaccagggtcaagaagccggaaacgcattagtcgatgtgctgctgggtaaggtcaacccaagcggtcgtctgccgattacctttccgaagcgcttagaagataatccttcatttgggaactttggagatggtggcgagaagaatcaaatagcatataccgagggcatttatgttggttatcgtcattataactcgcgcgatatcccagtgttatttccttttggattcggcttgagctatactagtttcgaactgggcgcgccgaccgtcgaccaggccgcatttgaaatcggcaagaaaatcaccgtccaagtgcccgtgaaaaacaccggggccatcaaagggattgagaccgtacaagtgtatctggccccgaagaaatctgcagtagaccgtccgaaacgcgaacttaaaggctttgcgaaaatcgaattggaagcgggtgaaagtggtgtcgcccgtattgaactcgatcattacgccccgggcttgttttgtgaagaacgcaaatgttggcgcgcattggagggcgcttatgtggtggaagtgggacgtaatgtgcaggaaattgatggctcagtggaagtagctgttgagcgcgagtatgaatgggtcttctga

SEQ ID NO: 974 - DNA, 2295 bp, Artificial Sequence
  6xHis UPI000189C68F
atgcatcatcatcaccatcatgaaaacctgtattttcagggctcaatgccgcatgcgtcacaacagaacactacccccgctcatgaattgccgttagaaaaacgtgcggccttgacatcaggcgcggatgcgtggcacttaaatggcctgtcggaatccacgagttacatgattaccgacggtccgcacggcttgcgtaaagcggcccagtcgacgtcaatggacatcgagcattccatgccggcgacttgcttcccgccggccgcgggcatggcaagtagttggaacccgggcctagtgcgcgaagtgggtgtggctataggcgaagaatgtgtacaggaaaaagtagcagttttgctggggccgggcgtcaacattaaacgtaacccgctgggtggccgcagtttcgaattttggtctgaagatccttacttcgctgggcatgaagctattggtattgtggagggtgtgcagtctacaggcgtaggtacgtcactcaagcacttcgcagcgaacaaccaggagaccgatcgtatgcgcattgatgcgcgtgttagtgaacgggcgctgcgcgaggtgtatctcccagcgtttgaacatatcgtgactaaggcccacccgtggacggtgatgtgcgcttataaccagctgaatggcacgccttgctcccagaactcatggctgttaaccaaagttctgcgggacgaatggggtttcgacggtgtggtgatcagcgattggggcgcagtgcatgaccgcgttgaagctctgaaagcaggattaaatctggagatgcccccaaccaatacggatgaacaggtcgtggttgcggttcgcgatggccttctggacgaagatcagcttgatcgaatggcccagggtatgctggatcttatcgaaaaagcagcgccggcaatgcagcaagatgaccacccgtatgatctcgttaatcacggtgcgattgcgcgtagggcggctcaggaatctatggtactgttgaaaaatgatggcggcattctacctctggctgctgacggcagtgtgtctattgcagtgattggcgaatttgctcgcacccctcgttatcagggtggcggtagttcaaaactcactcctacgtatgtgagctcttttctgggcagcctgcacattcgtgacattccagtggattttagtccgggctttaccctagatgacgcgaaacaggatgcggcgctgaccgcccatgcgatcgatatggcctggcgaaatgatgttgtgttgttcttcgcgggtctgccggaagaagcggaaagtgaaggcttcgatcgagaaaccattgatctgccacagaaacaactgcgactgttagccgatatcgttaaggtgaatccgaatgtggttgttgtcctttccaacggctccgcggttagcgttaccccgtggcgagattcagtgcgtggtttactggaagggtggctcctcggccaagaaggagggaatgcgttagcagacgttattttcggggatgtgagccctagcagcaaactggtgcagacgattccaatgtcagttctggatgacccgagtatgcccaattggccgggagaagcaggtcatgtggattatggcgaaggtgtcttcgtgggctaccgctactatgatacattcggtcgccaagtggcatatccttttggctacggcatgacctactcgacctttgagatcaggaacctgagcgcgattccccacgataataccgtacaagtaagcgccattgtaactaatacgggtcaagttcgtgcatcagaagtggtgcaactgtacgtcgcgccatgtgcgtgcgatgctgcgagaccggcgcatgaacttaaaggttttgagaaaattacccttgatccaggtgaagcgtcaatcgttacttttgagttagattcgcgttcatttgcatactggagcgagccccgcaacgattggcatgtcgaacgtggtacatacacaatcgaaatcggctccagcagccgggatattgcggaacgcgtccaggtggaactgccgggcgacggaattcggctgccgttaacgctcagctctacctttgatgagtggagcgatgatccgattggcgggccgattcttcaggctgcgattaaccgcttaagccagcaggagggtcacccgattattcccgaatccgatatgctgcgtatgttgctgggaagcatgcctatgaatgcgaccaatgttttgctaggctcagccgcaggtcgcttatgtgaacgtattatgggactgtacaacgcgagcaatcagtga

SEQ ID NO: 975 - DNA, 2448 bp, Artificial Sequence
  6xHis UPI00020ED2C9
atgcatcaccatcaccaccacgaaaacctgtattttcagggctcaatgacatctaaagagattattccgcagatgaccttggaggagaaagctgctctgtgtagcggccgtgatttttggagcctgaagggtattgaacgatttggccttgaggccatcatggtgaccgatggcccgcatggactacgcaaacagggtggcgatggcgaccacctgggcctgaaccaaagtgtgccggcgacctgtttccccgcagcatgtgcaaccgcgtgcagttttgatcgcagtcttcttgaagaaatcggtgcggctatgggcgaggaatgccgcaaagagaaagtcgctgtccttttgggccctgcggcgaacatcaaacgttcgcctttatgtggccgaaacttcgagtacattagcgaagatccttttttgactggagaaattgcagcagcgttaattaaaggggttcagaaactgggcgtgggcacttccttaaaacattatgccgtaaacaatcaagaaaaacgccgtatgaccattaatgcagtggtcgatgaacgggcctttcgtgaaatctatctggccgggttcgaaaaagcagtccgtgaagccaagccttggaccctgatgtgctcatacaacaaaattaacggcacctatgcgagcgaaaacaaaaaactgctgacagatattctgcgcgatgaatgggcgtatcagggacttgttatgaccgattggggtgcgagtaataatcgcctcgaaggtattaaagcaggcctggatttgcagatgcctggcccggacgcggacaatgataaacgcatcatcgaggcggtcaaatcgggagcgttgtcgattgaagaccttgataaagtggtagcccgtgtggtagatttgataattaaggccggggaaggtgattccattggctttgcctgcgacatggaggcgcaccatctgttggctcgcagggcggcggccgaaagcgcggtgctgctgaaaaacgatgagaacattttgccattagtcccgggaaagactctggccgttattggggcattcgcgatttcaccacgttaccagggcgcaggtagtagtaaaattaatccgtctcatctggataaagcgtttgacgcgatcatgcgtaccggcatcaaagccgaatacgccccgggttattccctggaagcggggagcggcgttaatgaaaagctcattgccgaagcagcaaaattggcgggcgaaaaggatagcgcggtcgttttcgcgggtttacctgacgaatacgaatccgaggggttcgatcgcgcctcaatggatatgtcagaatcccataataaactcattgaagccgttgctaaagccaacccgaataccgttgtagtgctgcagctgggctcacccgtggcactgccctgggcggacaaagtgaaaggtattctactgctgtacttgagcggtcaagcgggcgggggagcagccgcggatctgctgaccggaaacgcctgtccgggtggcaaattagccgaaacctggccgctggcgcttgaggataaccctagttacggcaatttccctggcagtaccaaaacggtagaatatcgtgagagtatctttgcgggttaccgttggtatgacgccctggaaaaagaagttcgctacccgtttggttttggcctgtcgtataccagcttcgaatacagcgaccttaaactcggtaccagtgccgaagcgaaggataactttaaaaagggtgatgcgctcaaagtaagctttaccgtgaaaaataccggctcccgtgaaggtagtgaaaccgcgcaactgtacattgcgccggatgcgagcgttctgtttcgtgctaagaaagaactcaaaggttttgaaaaattgcacctgaagcctggcgaaagcaaaaccgtgacgctgatcctggacgaacgctcttttgcgtattacaacgttcaggcgaaagattggtcgctggaggggggtctttatcgcattcttattggtgcaagctctcgcgacatccgcttagaaggaaaactggaactgacgggcgataagcgtgaaacagcgttcgcgttcttaaaaggtggccgcccggtttttgatgatgcatcgtttaaagccatctacggtgccgagctcccgccaaaagaacgtctgcccggagaaccgtttacggtgaatacgtctgtggaggaaattaaggataccccgattggcaaggcattatttgggatggcagtacagggcctggaacaagcatttggcaaagaaaaatccgatctgaaagtgatgatggaaagcatgctcatggacatgcctctgcgtggactcggcatgatgagcggggggaggctgacacctccggttatagaagccctggtggaagcattgaatggcaaaccaaatccaattgcgagtggcctcctaggaatgaagtga

SEQ ID NO: 976 - DNA, 2349 bp, Artificial Sequence
  6xHis UPI0002988429
atgcaccatcatcaccatcacgaaaatctgtattttcagggaagtatggcagaatccccgattcagtcactgagtatgcgtagtctgtccacggaacagaaagcggctttaacgtcgggtgctgatttctggcataccgaaagttgcgcgccgttgggtttgccggcgattatgctgaccgacggaccgcacggcctgcgcaaacagacggggagtacagatatgcttggtttgggtagcagcgtcccggctacctgtttcccacccgcagtagggctaggctcatcttgggatgttgatctcattcatcgcgtgggcgccgcactaggtgcggaagcaagcattgaaggtgttgccgtgcttctggggcccgcaatcaatattaaacgtagccctctgtgcggacgtaattttgagtacatcagcgaagacccactggtcgcaggcacgctgggtgccgctatggtcgaagggatacaatcacgtgcggtgggtgcctgtgtaaaacattttgcggccaacaatcaggagaccgaccgtatgcgcgtgagtgcagatgtggatccgcgtgctttacacgaaatctatctgcgcgcgtttgaacaagtggtccggcgtgcggaaccttggatggttatgtgttcatacaaccgtattaatggggtacccgcttcacaggatcattggctcctgaccgatcttttacgtggtcagtggggctttgatcgggtcgtcgtgtccgactggggggccgtctccgatcgtgtcgcgtctctgtcagctggcttagatttggaaatgcctggtaccgcagggaggaccgatgcacagattctggcggcgttagcaagcggtaccctggacgaagagaccctcgattccgcagcagcacgggtggttaccttgctgcgtcgcgcggcggttggcgcgggggaagtttcaggcccgctggatgttgacgcacaccatcgtctggcgcgcgaagccgcagcccgttccattgttttacttcgcaatgaagtccagcgctcagaaaccaccggtgacgagggtgctttgttgccgctgcgcccggacgcccgtattgctgttattggcgcatttgccgaacaacctcgttatcagggtgcaggtagcagtcgtattaatccgacccggctggataccgcgcttgcggaaatacgtgcccttgcatcaggtgaagtctcctattcccctggttttcgcttaaccccggaatcagtcggcccggctgaagaactccgccgtgacgccgcggaagcagccagccaggcggaagttgcagttgtttttctggggttaggggatgatgccgaatctgaagggttcgatcgcaccggtattgacctgagcgcggatcaactagcattattggatgatgtcctcgccgcgaatccgaatactgtagtagtgctcagcaacggtgctgttgtggcgttgcctttcgcagatcgtgtacctgcgattctggaggcgtggttaggtgggcaggcaggtgggggcggcgtggcagatgtactgtttggtcgcgtgaacccgtcaggccgccttaccgaaaccattccgaagcgcctggcagattctccagcgtatctggattttccgggagaacacggccacgtgcgctacggtgaaggcattttcgtcggttatcgatggtatgatgcccgcgaacttgaagttgcatttccttttggccacggtctgagctacaccaccttcagctacggccaggcgtctgcagccttagatgaagatgggaatattaccgtacggctgccggtgaccaacacgggtgcggtggcgggtcgcgaagttgtccaggcgtatgtaagtttgccaggatctgccgtacagcgtcctccccgtgaacttaaaggtttcgtggtggtagaagcagaaccgggtcagacagtagaagctgaaatgcttattcgccgtgaagatctcgcctactgggatttaagaattgaccgctggcgtgtcgaagccggaacataccggatcgatgtagccgccagctcgcgtgatattcgtagctccgtggaggtggttgtgcctgatggggatgctccaatccccctgaactgggatagcaccctaggcgaactgatggcgcatcccgtggccggccctgcgttagctcaagccatggccggcgcactagagggctttgcgggcgcgggcgacctcatgccggcgggtgcaatggcgcagatggcgggctcgctgccgctacgtgcgttactaactctaggcggcgatgcggttacaccggaaaccctcaatcagttgatcgttctggccaacggcagccctcgtaaatga

SEQ ID NO: 977 - DNA, 2517 bp, Artificial Sequence
  6xHis UPI0003D93613
atgcatcaccaccatcaccatgagaatctgtattttcaggggtccatgaaatcaatacaggaaatcagaagttccctgaccctggaggaaaaagcaagcctgtgcagcggtaaggatttctggaacctgaaatcgtttgaatcgaagggtgtccccgcgattatggtggctgatggtccgcacggcctgcgtaaacagatggaatctagcgcggatcacattggcattggtggctcggtaccggccacctgtttcccgaccgcaagcgcaatggcctctagttgggacacacagctgcttaacgaagttggcaacgccctgggcgaagaatgtcgccaggaacatgtggccgtcttgttaggtccgggcgtgaatattaaacgcagcccgctttgcggccgtaacttcgaatacttttctgaagacccgtacctggggggcaaactggcagcaagtttaattaggggtgtccagtcgatgggagttggcaccagtttaaaacacttcgccgcaaataaccaggagcgtcgccgtatgattattgatgcggtagttgatgagcgcgcgttgcgcgaattataccttgcggggtttgaaactgcggtgaaagagagcagtccgaagacggtgatgtgcgcgtacaacaagttaaatggtgccttctgttcggaaaatcatcgtctgctgagtgaaatcttaaaagaagagtggggctttgaaggatttgtggttaccgattggggtgcagtgaatgatcgtgtggctggcctcaacgcgggcttggatttagaaatgccagcgtccggtggctataatgataacttaatggttgaagccgttcagaacggcaccctgtccgaaaactcactgaacgatgcggtggatcgtatcttgaaagtggtgcttgaaacgcacaccgccctgcaggaagagtttacttatgatgcggcagctcaccatcgtctggcccagaaagcggagtcggaaagtgcggtactacttaaaaacgacaagctttttcccttaaacagtgaagactttcgcaccgaagaaaagcatggctcgcaggaacacaaatcgccgaaattggcgctgataggtagttttgcaaaggaaccccgttaccagggctcaggcagctcattaatcaatccgcgtcagctcgattcagcgtatgacgcgatttctcgcgaattgggtggtgacatgcagctgctgtatgccccggggtacgacccggctgatgaagagcctgattctcgcttaattcaggaagcggtaaataccgcagccgccgccgataccgttatcgtgtttgcaggcttaccggagattagcgaaagcgagggatttgaccgtgaacacctgagcatgcctcgcagccataacgatctgatctcagccgtcgcgcaggtaaaccctcgtaccgccgttgttctaagtaatggttcaccggttacgatgccctggttggattcagtaccggcagtgctggaaagctacctcggcggccaggcatggggtagcgccatttctgatattatttttggtcgcgccaacccgagtggcaaattagcggaaacctttccgctatcgttgcaggatgtgccgagctctgcccagtttccgggtggttccgcatcagtcgtgtataccgattcactctatgtcggctaccgctatttttcgggtactggcaaaccggtgctctttccgtttggtcacggactctcctatacccgcttctcatatgatggactcaaaatcaccggccgtggcacgggtaggaccgtgcaatgtcggattacaaacactggcagtcgagacggcaaagaggttatccaactgtacgtgcactccgaatcaagctcagtctttcgtccggaacaggaactgaaaggcttctccaaagttagcctcgcgccgggtgaagaaaaaactgttgaattccgcctcgatgatcgtagcttcgcatattgggatccgggtgcaggcgattggatggtagagagtggaaattacgaaattcgtattgcggcgagcagtgccgacattagattgcgcgaaaccatccgaattgatagcacacaaacccccagccagtgggcggcggatctccgtaaccgtatcccggagttctttagtcctgccccggaattattccacgatatttcaccggaatcaccgtttcgcaagctgcttggacgcccgattccaccaccccattgggatactcgcgagggctttacacgcaactccaccctggaagaaacgacacgtacgttcattggccgaatcctctataaagccgtcatgcgagagggaagcagaatgatgtcgcaagatgccgacgaaaaatctatcgccatgatgcaggcagttatccgcgaaatgcctctgaagaatctcggcatgatgggcggtgataaaatctcgatgcacaccgtggatagtctgatactgctgctgaatgggaaaataattcgcgggctcggcagcctgttgcgccgtaagtga

SEQ ID NO: 978 - DNA, 2178 bp, Artificial Sequence
  6xHis UPI000503588E
atgcaccaccaccaccatcacgaaaatctgtattttcagggatctatgaacgaaacaagcatggatgacgcggctcgcaaagccacggaagctccccgtgcccgtgatctaagcgtagaagaacaggcgagccttacttctggcgcagacgcatggcacctacagggcatagaatcaaaaggcattggtggttatatgattaccgacggcccccacggactgcgtaaaacagcgggtgataccggtgccattgacctgaaccacacagtaccgactacttgttttccgcctgcagctggcttgtcttcaagttggaatccggaacttatccgcaatgtaggagaagcaatggccgaggaatgcattcaagaaaaagttgcagtcattctcggccctggcgtcaacattaaacgcaacccgctgcgtatttccgctaatgtgagcgcccgcgcgttacgtgagatctatttgcctgcctttgaacatattgttaaaaccgcgcagccgtggaccatgatgtgctcttacaaccgtattaacggcgagcacagcgcccaaaaccattggcttctgaccccgacctgttgtgtgggatctggtgcaaccacccaccgtgatgaacgtttaggggccgatcacgatagagtagcaagcctcaacgcgggcctgaatctagaaatgtcgcccagctttacggatgagcagattgtaaacggtgttcgcgatgggcgcgttgaaccgaaacagctagaaactatggcgcaaggaatgatcgatttatcagccaagacacgtaaagcgatggaaattgagggctaccgttttgacgtagatgctcatcatgaaattgcacgccgtgcggccgatgaaagcatcgttatgctgaaaaacgacgccaatgtcctgcctgccgatcgtggggattcgctggcagtaattggcgaatttgcccgtacccctcgttaccagggtggcggttccagccatatcaccccgacccgtatgaccggttttctggatgccctgcgtgaagatgatgtggatgcgcgttttgcgcctggttttactttcgacgacgcaccccaggatccgcgtttgacagacgaggcgctcgccgcagcaaaagcatcggaccgtatgctgatgtttcttggcctgcctaatcaggccgaaagcgaaggtttcgatcgtaccaccttggatcttccggctaaacagctggagctgctggatcaagtgacccaggtaaatgatcatgtggtagtcgtgttatcaaatggcagcgtagtctcagttgcgccgtggcgtgataaagttcagggtattctggaagcctggctgttaggccaggccgggggacgtgcattggcagatgttatttttggcgatgttagcccgagtggcaaactggcacagagcattcctatgcgcattgaggacgatccgagtctggtgaattggccgggagaagaagggcatgttgattacggtgaaggcgtgtttgtggggtaccgttattacgataccttcgatagggaagtggcttacccgtttggctacggcttaagttacggttcatttgaactgcacgatgtgacggtgcgttgcaccggagacgcagcagcatctgttgcagtgattgtcacgaatacctcggaagtgactgccgcgcagactgtacaggtctatgttgcccctcccaaagcacgtgtagctcgaccgcgccatgaactcaaagcctttgccaaggttgccttagaaccgggagaatctaaacgcgtcgagatggccctggacgaacgctcgtttgcgtattggtcggaacgcttcggtgattggcgagtagaagcaggccgctacgtaattgaggtgggtacctccagtcgggatattgccgataccgtgaccgttgagcttgaaggcgacggtaagagcatgccgttagatgaatggagcaccttcgaagaatggcgcacggatccggtagggggtccgattgtagaacagatgaaacgtgacgcagatgccggcttactacctgcgctgccggaacataacgctggcgtggaattgttcttagacggtatgccgattaattccatgactgttctgctgggcaaggggggcaaagagattacccgctacctgctggaacaatatgcgcggcgcattaaatga

SEQ ID NO: 979 - DNA, 2301 bp, Artificial Sequence
  6xHis UPI000499F5D1
atgcatcatcatcatcaccatgaaaatttatacttccagggcagcatgaccacggacaaacacctacaggcaaaagatctggacatcgagaaggaggcgagcctgacaagtggctcggatgcctggcatctgcagggagtgccggatcagggttacccagagtatatgattacggatggtccgtatggactgcgtaaagctaccggttccgatgtatatgggagcgtgccggcgacctgctttccgccgacagccggcctagcgagctcgtggaacccggatttaacctaccaggtggggcaggctatgggcgaagagtgtattcaggaagaagttgctgttatcttgggtccgggcattaacattaagcgctctccgctgggcggtcgcaactttgagtattatagcgaagatccggtactggcgggccatcaagccgcgggccttgtggatggagtgcagagcaaaggcgtgggtacaagtctgaaacatttcgccgctaataaccaagaaacggataggctgcgtgtgagtagtgacattgatgaacgcactctgcgtgaaatctatctcccggccttcgaatatgtggtcaagcacgcgaagccttggaccattatgtgcgcctataacaaactgaacggagtatatggcagcgagaatcgctggcttctgaccgacgtacttcgcggagaatggggctaccagggtctggtgatgtcagattggggtgctgtgcatgatcgcgcggctgcgctacgcgcagggctgaatttagaaatgccgccgtcggcatcggatcatgaagtggttgaagccgttcgtgcgggaaacctggataaagatcagctggatcgtatggcacagggcgttcttgatttaatcgaaaaagcgaagccggccatgagccaaaaggggtatcgttacgatgttgaagcacacgatcaagttgcacgtcaagcggcgcaagagagtatcgtgatgcttaaaaatgaagatggcgtgctgccgctggcaccgggagaaaaagtggcactcattggggaattcgctcgtaccccgagataccaaggtggcggtagttctcacattactccgaccaaagtcaccacagcacttgactccttcaaagagactggcatggacgtagatttcgtaccggggtttacactggatgaagcgccgcaggatcagtctttgaccgatcaggcggtgaaagcagcagcggatgcagacaaagtggttttgttcctgggtttgccggaagacgcggaatccgagggcttcgatcgcacagatattgatttaccgacaaaacagcttgacctgctgcgcgccgtaagccaggtgaacgatcaggtggtcgtcgtgctgagcaacggttcggttgtgagcgttgtggattggctgcctcaagccaaggcagtgttggagagctggctgctgggccaagcgggaggacaggcagtggttgatatcctgaccggaggtgcgaacccgagtggccggttgcccgaaacaattcccgttcgcctagaagataatccgagtattacatcgttccctggtgaagagggccattcgcgttacggcgaagggatttacgtgggttatcgttattatgacacctttaataagcccgtggcattccctttcggcttcggcctatcatatagcacctttgagattagcaatgttcgcgtggaaaaaacgggcccgaacgcggtacgtgtagatcttaccgtgactaataccagcggtattgatggagcggaaacagtgcaagtgtacgtagctccttgtgcgagtaaagtgggccgcccgagccacgaactgaaaagtttcgccaaagtatttttaaaggccggtgagtctcaggaaattagcctggatttggatgagcgcgactttgcttactggtcgaccgccatgaacgaatggcatgtagaagctggtacctatggcattgaagttggaaccagctcgcgtgatctggtatctaaactggatgtggacttagatggcgacggactgttcgttcgcttaaactcgaacagtactatggaagaatggcgcgaggaccaggtcgggggcccgattatgaagtcacacgtagaggggggtaaagttccgttaccgaacgacccgaacacagctaaactgtttgattcgatgccactggctagcgtgattacacttagtgggggcgatggtaactcggtggtagcggacatgatcacggattaccaaaaagctattgagcagcagggcctcacaggtgcctctcgtggatcagaatga

SEQ ID NO: 980 - DNA, 2421 bp, Artificial Sequence
  6xHis UPI000659257F
atgcaccaccatcaccatcacgagaatctgtactttcaaggcagcatgaatgacaacaaatacagccagaagattaaggaactgatgaaggaaatgactctggaagagaaagtgtcactgctcagtggcaaagatttttggtcaaccaaagcgattgaccgtctgaaaattgattcggtgtatctgacggatggccctcatggtgttcgcaagcaatcaaccgagtctgatgaactgtccctccagaaatctgtgagcagtacgtgctttccgacggcttgctgcagcgcttgctcgttcgatccaaatattatgtatgagatgggtgaggcgattagccgtgaggcgaaggccaataaagtgagcgttgttctcgggccgggtgtcaacattaaacgctctcccctgtgcggccgaaattttgaatatttcagtgaagatccatatcttgccgggaaaatggcaagcggctggattaatgggctcgaagacaacggcatccaatcaagcctgaagcattttgcagcgaacaaccaggaaaccctgcgcctgattatcgactctgtggtagatgaacgtgcgttgcgcgaaatttacctgtacgccttcgaaatcgcagttaaagaggctaaacctagtaccgtaatgtgcgcatataacagcgtcaacggtaccttcgcaagtgaaaacaagtatctactaacagacattttgcgtgatgaatggggctttgatgggatagtagtgtccgactggggtgctgttaatgatcgtgtggaagcactgaaagccggattggatctacaaatgccgtccaccaatggcgaagacgacaggaaagtgtacaacgccgtgaaagagacgattattgatgagaagattctggacaaagcggtcgagcgcctcctgtacttctcactgtacagcatggataacatctacgataacttcgattatgacaaagaggagcatcacaatatcgcacgaaaaatcgcggaaaatagcatcgtgttgcttaaaaatcaggacaaaatcctgccggctaaaaaagagtcaaaaattgccgtcatcggcgaatttgcccagaagcctcgctaccaggggaacgggtccagtctgatcaatgcctataagattgataccgccgaggaatacttcaaagaaaacaatattgaatttgactatgctaagggctatgattcaaacagtgcggatattgataacgcactgatagaggaagcagtcaatattagtaaagataaagacattgttatcatattcgcgggcttaatcaactcttacgaatcggaaggttttgatcgtaagcacctaaatcttccggaaaaccacaatcaccttattgaagaaatatcgaaggtaaacaaaaacgttgtggtggtcttgagcattggtgcgccggtactgatgccatggattgataaggttaaaggtgtgctgaacctgtatttagcgggcgaggcggcagtgagcgccgcctttaatatcatctttggcgtggtgaatccctcgggcaaactggctgagagtttcccccttagcctggaggataatccgagttacaaatactttccgggcggaaacaaagccgtggaataccgtgaatcgatttttgtaggttaccgctactatgacaaggcacagaaaaatgtcctgttcccgttcggttttgggttaagctatacgaccttccaattctctaacttgatagtcagcgatgcgaatacaattgccgggttagataatattcacgtagtctttgatatcaagaataccggcgatgttttcgggtgcgaagtggcacaggtgtatatctcagcccctgagaacaatgtgttcaaaccccataaagagctcaagtcctttattaaagtgtttctggaacccggtgaaaccaaaaccgtgattcttaagctgaataaacgcagcttcagcttctacaatgcggacaccaagcagtatgaaattgagagcggtgtgtacactatctacattggtaattcgagtcgtaacctgttgctgagcaaaacgatggaaatcaactccattaactattatcagaaacgcatcgacaattactttaactttaaagaaattaacatctcagataacgaatttcagcagttgctggggcgtaaactgaaaccgattaacattaaggcgagcaaaccgtatcacctgaataacaacttaagtgatctgctggacaacaatatagctaaagagttctataacaaacttctgtccggattaaacgacatgttcaaggacgacaagaccgacaccaaaaaaatgtttgagtccatgatgttggaaacccctctgcgtagcctgcataccatgagcggcggcataattacgcgtgaagatgtggaaaacctgattaacacccttaacaagtga

SEQ ID NO: 981 - DNA, 2538 bp, Artificial Sequence
  6xHis UPI0007F2FD44
atgcaccaccatcatcaccacgaaaacctttactttcagggtagtatgactcaattaaccaatcaatcatcagacgtggtaatcgacaccttactgactcagctgacgttaaaagaaaaaatcagctttctggtgggggcaaacgtatgggagaccgtgccgattgaacgtctgaacattccgtcgctgcgagtgactgatggtccgaatggtgcccgtggcagtcagttttttgacggcactacggccgcgtgtttcccggcgtgcgtgagcattgctgcgacgtttaatggggatctgaccaaacagattggcatcgcgctgggacaggaaagccagactaaaggcgcgtatgtactgcttggcccgaccgtttgtagtcatcgctcaccgttggggggtcgtaattttgaggcgttcagcgaagatccccttttatctggcgtactggccgcagaatacgtgaaaggcttgcagagcgaacgcgtgtcgggtacaataaaacactttttgggcaatgaacaggatacccgccgctttaccgtgaacgaaattatttcggaacgcgcgctacgtgagatttacttgcgcccgtttgagattgtgattaagaccgcggatccgtggtgcctaatgacgagttaccccaaaatcaatggcaaacacgttgatacctctaacgagttccttcagaagatcctgcgcgaagaatggaaatacccgggtctcgtaatgtccgactggggagcgaccactagtaccgttgaatctctcaatgcgggactggacttggaaatgccgggtaaaaccaagtggcgcagcctggagcaggtgaaacaggcgctggaggctgggaccctgaccgaatcgactatcgaggaccgtgcgcgtgcagtccttcgcctgctgaaaaaaacgggcaaattcgacgatcgtaaggacgatattgtggaaacggcggttgatctccctgaacatcgcaaactgatctgtcatgcgggtgccgaaggcattgtcttgctgaagaatgcagagaacattttgccgctggataaaagcaaatgcaaaaaaatagccctgctcggtccgctggcgaaatatccggctgcccatgcaggtggtagcgcctccctaaactgtcattataaagtgtcacctttcgatgcgtttagttcccgtctgggtgaagatactatcattgcctacagcaaaggtgcccacattttccgcgtgcatccggatatggagaaggagtgtaaaacctcgacggggaacaacgggttcgaggccgaatattggaaaaatagtacttttgaaggagaacccttccacacggccgaatttgcgcgcgggtcctttaccaccctgatggataccgcagttgaaggcaagttatccgtacgtttcaccaccacgtataccccgaccgaaacgagcagtccatacctgagtttcagcacgatgggcccgtctaaaatgtacgttaatgatgttacccttttcgaacaggccgaagcaaccaaggatagtatggcgttcctgttgggcgtgcaggatgaactgcatagccaatatttattcgaagctggaaaatcgtataaaattcgcatcgacaacgtgagctcaccggaaccgaacggcgaattatatctgttggatggccaaatcgcggcgcatttaggctttatccctcaggtggagatggagctggatgtgttaagtgaagcgactgagctggcaaaggaagccgacgtagcgatagtgtgcgttggcaacaccgcccagtgggaaaccgaaggtcaggatatggatgacatgaatctgccggctgacggctcacaggatcgcttgatcgcggctgtagcagccgttaatcctagaaccattgtggttaataccattggcgtggcggtgacgaccccgtggctagattctgtaccggcgtttctccaagcctggtacgcggggcaggaatcaggcaacgctattttcgatcatactgctgtgtacggcaacttcggcatggacagttacgaatcacgccaggtggagtatgttgaaggtgtgttcgtggggtatcgccacttcgatcgcatgtgggggacggagaaagaagttcggtggccgtttggttttggcctgagctacacctcattcgagatcagcggtgcaaaagtagaaggtagcttagaagcccctggcggccacggcccggtcattaccgcggacataaaaaatgtcggtggattcgctggcgcggaagtggtgcaggcgtacatcctgccgccgaaagcgagcgacgaccatgtgataaagagcctggtcggttttgccaaaatgactctggaaccgtcggaaattggccgtatttctatagatgtgaatgtgttgcaggccgcctattggcacgtggaatcgcgtaaatggaaaattaaagccggcacctataaactgtgggtgtctactagcagcagccccgacgaccggaaagcagagttagaaatcgtggtggagaaagccttctttattgacccttga

SEQ ID NO: 982 - DNA, 2454 bp, Artificial Sequence
  6xHis UPI000A2BB4A5
atgcaccatcatcatcatcacgaaaacctgtattttcagggatcgatgaccgaaagcgttgcccacctccgtcctctactggatgccttaaccttagaacagaaagctgccctggtccaaggcgcggatttctggacgaccgtccctcttccggaaattggcctccgtgcaatgactttaagcgacgggccttccggggtcaggggccctcgttgggatgaacgggaaccgagcctgaaccttccgtcgggctccgctctggcagcttcatgggatgtggatctggcgtatcgctatggagccgccgccgcatctgaagcgcgccgcaaaggggtggacgttgtcttaggtcccaccattaacttgcaccgtagccccctgggtggacgacattttgagtgcttttcggaagacccagaacttactgcagaactagcggccgcctatgtgcgtggtatgcaggataacggagtcgcggcgacaccgaaacattatgtggcgaatgatagcgaaaccgatcgcttcaccgtagatgttgatgtagatgatcgcgcgctgcgtgaactgtacttggcgccgttcgaaagagcggtggaagcaggcgcgtggagcgtcatgagcgcgtataatgcggtggacggtgtgaccatgaccgagaatgatctgttggaaacgccgctgaacagcgaatggggatttgatggggtggtggtcagcgattggaccgcggttagaagcttggacgccgttgcagcggcccaagatctcgcgatgcctggtccggcacccgcgtgggcggatttacttgcagcagtacgcgatggccgcgtgcaggaagccgatctggatcgcaaagtattacggctgttgctgttggcagagcgcgttggtgcactggaaggatccacagcgttggaaccggcgcctgtggatgctgaagcgtttgctagggaggctggcattgaaggcactgttctcttacgtaataccggagcactgccgctcgatgttgcggcaattcgtagcattgcggtgattggccataatgcccgagacgccagaacccagggcggtggcagcgcaacggttctgccggaacgtacggtgtcccccctggatggtctgcgcgaagctcttcctgaagcggatctcaggtacgaaatcggagccgtggttcaagagggcgtcgcggaaataccagtggcacagctgcgtaacccggagaccggcgagccgggattacgcgtacgcttcctggatgaggatggcgcggaactgttttctgaagatcggcgctcaaccgccttagtttggttcggcggggatgcgcctgttgcggcctcgtcacgcgtcgtatttgaaacggttttcacgccggctgaaaccggtgaaatccaactaggttttgcgggagccaatccgggtcgcttatacgttgatgaccgcctggttctcgatgatactcccgttatcgagggtaccgatttgggggcagcctttttaaacccgccgtccctgacagcaggtgtgtcggtggaacaagatactccgatccgagtgcgtgtggaattcaccttagcacgtggaggcgctttagcgggtgcgttgtctgccactgtcggtatcgcgcccgaagcgaccgatccggaagccctcattgcgcgagcagtagaagccgcagcagccgccgatgtagccgtggttgtggtgggtaccaatagcaaggtggaatccgaaggctacgatcgaattgacttggatctgcccggccgccaagatgatctagtccgtgcagtcgctgctacaggcacacctgttgtagtcgtggtgaatgcggggtcgccggtggtgttgccgtgggctgacgaggtaagcgcaatagttcagggttactttggtggccaggaatttggtcatgcattggccgatgtgctgaccggtgcggccgaaccggggggtcgtctgccgacgacatggcccgccacactcgcggatgtcccagtgcaggatgttacccctcaggacggcgtgctgacttatggggaaggcattcacgtaggttaccgtgcctggctgaaagacgcagcgacccctgcattcccctttggccatgggttaggctatactacctggagctggggcgccgcgcatagacacggcgacgcggtagacgtgacagtgcgcaacacgggtgatcgtgcgggtaaacaagttgttcaggtctatgcggaacgtggtgattcgtctgtcgatcgccccgtgcgctggctcgtggggtttgcgaccgtacatgccgagccgggcgagactgttactgctaccgtccccgttccgggacgtcgattggcacattgggcagacggctgggtcgtggaacctggtgcctacactcttagggctggtgcttcggtggatgatcttccactggccctggagtggacagtcgccgaatga

SEQ ID NO: 983 - DNA, 2568 bp, Artificial Sequence
  6xHis UPI000D5BC9BD
atgcatcatcatcatcatcacgaaaatctctacttccagggctccatggccgatctgctgcaaaaactgacccttgaggaaaaaatcaggctgctaagtgccgaaaacatttgggaaacgctggcgattgagcgcgtagggattccgagtctaaaagtgacagatggccctaatggtgcgcgaggcggcagtttttttgatggcaccaccgcggcttgctttccagcatgcgtgtcgctggccgcgacttttaaccgctcgctcagctaccaggtcggaaaagcgattggtgaggaagcgattaccaaaggcgcgtacctgcttttaggacctaccgtgtgctgccatcgaagcccacttggtggccgcaactttgaagctttctcagaagacccgtacctgtcaggcgccttggcaagcgaatacgtaaaaggtctgcagcgcgaaaaccgcgtggcagccgccgtgaaacatttccttgcgaacgaacaggatacccgccgcttctccgtaaacgaaaaaatatcagaccgggcgctgcgtgaaatttacttgaaaccgtttgaaattgtggccaaagaagccgatccgtggtcttttatgagttcgtatccgaaaattaatggcaaacacgtggatgcgcagtctaaattcttaattgatattctgcgtaacgagtggaattatgaagggcttgttatgtcagattggggggctacgtcgtgcgccgagtcggtccgctatggtcttgattgggaaatgccgggtcccccgcgtcagcgcacgttagaaaacgtgcagacggctctgaaagccggtgaaattaaagaaagtgatatcgatactcgcgtgctggccacgctgaacttactgaaaaaggttggtaaattcgacgaccgtcgtgtcaccccagaagaaaaggccattgatagactggatcacagatcactgattcgcaaggcgggatctgaaggactggtcctgctgaagaacgagggtagcattcttccgatagacaccaagaaaaccaaaaaaattgcattactcggcccgttggcgaagtatgccgcagctcatggcggcggttcggcaagtttaaattgtcactacaaagttactccttatgacgccgtcgcggaacgacttggcaacgatgtggaaattactcattcgaaaggagcacatatctttcgagtgtatcccgatgtcgaagcgggttgcagtaactcaaggggcaatcctggatttctcgcggaatactttatggacctggaaccgagcacatcaccctttcgttctgaagaattcccacgtggaagctttactactctgatgaatacacacgttaccggttgcaaaacagtccgctttagcactatttatcgcccccccgttagcggaaaccactatatatcgttctcgggcctcggtccgagtaaacttttcattaacgataccctggtggcagagcagcgtgagccgatcaaagacgctatgggtttctttctgggtgtacaggacgaggtgcgcattcagtatgatttcgatagctcgaaggaatactcaatcgtcgccgagacccacccgagcccctacagtaatgccgagctgtatcttatggaaaaccagtgctcgattcatctgggcctgatcgaacaggccgaaatggagcaggatgtactgtcagaagctgtggacttagcgggcaaagcagacatcgccattgtttttgtgggcaacaccacgcagtgggagaccgaaggccaagatttgagtagcatgacgctgccagcggatggctcccaggataaactggtagccagtgttgtcgcggcaaacccgaataccatcgtagttaacaccaccggtgtacctgttgaattgccttggctggagagcgttcctgcattgattcaggcatggtatgcgggacaggaaacgggtaatgcgattctggatgttttactgggtgaagtgtgtccgagtggcaaacttcctatttcatggccgaagaaatacgaacatacgggctgctatggtaattttggcttggactcctttgaatccagatctgtggagtacgttgaaggcgtgttcgttggctaccgctggttcgacaaaatgtggggtggcgaaaaagaagttcgctttccgttcggttatggcctgtcttacactcagtttgaactgagtagcgctaaattggccggtagtattagcgaagatgcgaatgcgggcgtgaatgtgaccctgaagctgaaaaacattggcaccgtggccggggcagaaacggtacaggtatatgtggaacccccggtcgttcgtggtactgatcgtcccgttaaaactctcgtagggtttgcgaaagtggagcttcaacctggggaagaacaggaggtggatgtagaattcaaacgtgatggtgcggcattctgggacgagaagcaatctcgttggaaaattagcaaaggcattcatgccgtgcttgtagcgacaagctctgatccgaaggatgtaaaagctcgtctggaaattgccgtggaaggggactttctgttttcgccgtga

SEQ ID NO: 984 - DNA, 2544 bp, Artificial Sequence
  6xHis UPI000F3DC30B
atgcatcaccatcatcatcacgagaatctgtattttcaagggagcatgaatctgcctttatcgccggccgttactgcgcctgccgcgggaagccctgatgcagaagcgctcattcataacttagccgactccctgtctttagccgaacaggtgcaattattaacgggcgctgacgtctggtcaacccatacgctgccgtccattgggctatctcgtatcgtattatccgacggccctgcgggtgtgcgtggcgaggattttgatgagcgccatgattcggttagcttaccgagcagcagcgccttaagcgcgtcgtggtccgcagagctggcgcatcgttatggacaggttctcggtcaggaggcacgccgaaaaggagttcacgcggtcttaggtccgaccattaatctccatcgcagtccgctaggcggacgccatttcgaatgtatgtcggaagatccgcgtcttactgcgacaatggcggcgggctacgttgctggtgttcaatctatgggggtgggagcgacgcccaaacattacctggcgaatgaatcggaaaccgatcgctttaccgtcgatagcgttgtggccgaaagacccctgcgcgaattatatttagcggcctttgaagatgcgatcaccgaaagccgtgcctggttagtgatgagttcgtataattccattaacggcaccaccgccagcgaaaacgacttactggagactcctctgtctactgaatggggcttcgatggagtcgttgtaagcgattggaccggcgttcgcagcgtggaggccgcgaacgcgcatcaagatctggaaatgccgggtccagttgggcattggagcgcgaagctgttagcggcggtcgaatccggtcaggtttcgcgtgaggcgatcgtggaaaaagtagtgcgcatcctgcgtctggcagcccgcgttggcagtttagacggcgtgtcgccggctgtagcggaattaccggcggcactggatagcgccgctgttgcacgtgaagttgcgattcgtggcgcggtacttattcgtaattcggccggtttgctcccgctggatgctagtgcccttaccagcgttgcgctcagtgggcataatgccgatgaggcgcgcactcagggcggtggatcggcaacggtcatgccgaaacagaatatctccccgctcatgggtcttcgcgaggctctacctgcaacgacctctttgagctacacccgtggcgcgaaagtggccgagggattgcagcagtttgcgcgtaccgccctccataaccccgtgagcaatgtacccggtgcccgtgtgacctttttggatgcgagcggcacggaaattttcgccgaagatcgtttagctagttcactaatttggttcggtgttggtatccctgaaggtaccgccgcgatcacgatttcgacggactggacagctgagcaggccggtgtacaccatctgggccttgggactgttggtcaggcccgtctatcttttaatggcactgaagttttcaacggagaactgctggataccacaaatgtcctgggtgcggcgctttttgacccaccgagtaccgtccatcagatcgagaccaccgcgggggaaaccgtgcgcattgaagctcattacaccctgccgcctgaacagtttattccgctgaccgcgattctgctgggtgaagaggccgtggtgacggatccgcaggcagagatagatgatgccgtcgctgccgcaagtagcgctgatgtcgcgattgttgtagttgggactaatagtagcattgagtctgagggctttgatcgcagcaatcttgacctaccgggtcaccaaaatgagctggttcgagccgtggccgcagcaaatccgcgtacaatagtggtcgtaaacagtggctcgcctgtgctgatgccttggcttgaagacgtcggcgccgtacttctgggttggtttggcggccaggaatttgggagggcgattgcagacattttattgggcgttgcagaaccgggtggtagattgccgacctcttggcctgcagccctggcggatgtgcccgttctatcgaccaccccggtagagggaaaactggagtacgcggaaggtatccacgtggggtatcgcgcgtggctgcagcaacaggcagcaggtggcccagcaccggctgtaccttttggttttggcctgggttatacctcatttgagttcagtgcaccacatgccccgcaacaagtgcaagcaggcaacgatgtgatcgttcatgtacctgtgcgcaacactggctcacgtgccggtcgcgaggttgtgcaggtgtacctcgaacgcccggatagtaccgttgaacgtcccgtgcgttggttggcaggctttgccggtacgcatcttgcgccggcgggtacggagagcgttgaagtacggattccggcccgagcgtttgaacattatgatggtggctggcaggtggaacgtggtgcgtttcgtattcttgttggtaagcatgttgaggacgactttcaggtgcttgcaattgatgtgaggtga

SEQ ID NO: 985 - DNA, 2544 bp, Artificial Sequence
  6xHis UPI0001664880
atgcatcaccaccatcatcatgaaaacttgtattttcagggcagtatgaaccccacacttccggcagctgccacggtaccagccgtcggcagcccagatgcggaagcacgtattcgtgatctggcagaatccctcaccttggagcaacaggttcaacttctgactggcgccgatgtctggtccacacatgccttacccgctatcggcctgagtcgtgttgtaatgtcagatggtcctgctggtgttcgcggtgaggattttgacgaacgtcatgattcggtgtctctgccctcaagcagtgcactgagtgcgacgtggtcggtggatcttgcacgtcgctatggccaagtgctaggtcaggaggcgcgtcgtaaaggtgttcatgctgtccttggtccgaccattaacctgcaccggtccccgctgggtggacgccattttgaatgcatgtcagaagaccctcgtttaaccgcaacgattgctgcgggctacgttgccggagtgcagagcatgggcgtaggagcaacgccgaaacattatttagcgaacgaggcggaaaccgaccgctttacaagtgatagcgtggtggatgaacgaccgttacgcgaactctacctggccgcctttgaagacgcggtaaccgaagcgcgcgcgtggcttgtgatgagttcgtacaattcgattaacgggactacggctagcgagaatgacctgctggaaaccccgttgagcacggaatggggctttgatggtgttgtggtcagcgattggacaggagtgcgcagtgtggatgcggccaacgcgcatcaagatctagaaatgcccggtcctgttggtcattgggggccgaaacttttagcggcggtgggtgatggtcgagtaagtcgtacggcgattctggataaagttgtgcgtattctgcgattagccgcccgcgttggtagcctggatggagtatcaccagcggtgactgaattaccggcccctttgaacgcaccggccgttgcccgagaagtagcagttcgtggcgccgtgttagttcgtaacaaggatggtctcctgccgctggatccggcggcattaggatcagtggccgtatcaggccacaatgctgaagaggcacgcacccaaggaggtggctcagcgacggtcatgccgaaacagaatatttctccactggaaggattgcgtgaagcactgccggccaatgtggcgatttcgtatcaccgtggtgcgaaggtggcggaaggtctgcaggcatttccgcgcacatccctgcataatccggtgtcgaatgttccaggacttcgcgtgacgtttttggcggcggatggaaccgaactttccggagaagatcgtctcgcgtcacatctgatatggtttgggatcgggattccggaaggcgctgcagcaattcgtatggaaacggattggaccgccccgagcgcgggaacccatcatcttggtctgggtactgttggccgtattcgactttccctgcgcggccaagaggtttttaatggcgatattgaagatgaaacagaggtgcttggtgcagccttgtttgatccgcctaaaaccgtacatgccatcgaaaccgaagctggtgaacgcgttcgcattgaagccctatttgaacttcccgcagatcaagccataccgtttaccgcgatactcttgggcgaggaaaccgtcgtagccgatccacaggccgaaatagacgccgcggtcgaagcggcacggacggcggatgtcgcggtagttgtggtaggaacctcggccgcgattgaaagcgagggatttgatcgtaaagatctggatttacctggtcaccagaaccgtttagtggaagctgtagcagccgccaacccccgtactgtcgtggtcgttaactctggatcacctgtgctgatgccttggctggataaggttggggccgtcctactcggctggtttggaggccaggaattcggccgtgcgattgcggacatactgttaggcgcggaggaaccgggcggtcgtcttccaactacttggccggccgccctggaggacgtacccgttttagacaccacccctatggatggcaaagtggtgtattccgagggcatccatgtcgggtatcgcgcctggttgaaacagcaggccgcaggtggcgcggcccccgctttaccctttggctatgggctaggttacactacttttgagctgtgtacccctcatgcgtcacaagcggtgccagcgggaaaagatgtcgtcgtgcatgtgccggtgcgcaacacgggcacccgagcgggacgtgaagtggtacaggtctatctggaacgcccagaaagtgccgtggagcgtcctgttcgctggctggccggctacgccggtacacacttagcagcgggtggcacttctagtgtggaagttcgcatccccggtcgggcattcgcacactacgatggaggctggcaggtcgaacccggtacctttcggatcctcgtgggccgtcactctgcggatggcttccaggccttagacattgacgtgcgttga

SEQ ID NO: 986 - DNA, 2496 bp, Artificial Sequence
  6xHis UPI0002120C63
atgcaccaccatcaccatcatgaaaacctctacttccaaggtagcatgggcatatccgagattatctctaaaatgaccctggaagaaaaagcatccctatgctccggcaaagatttctggcgcctgaaagaaatcgagcgtctcgacattcctagcattatggtggcggatggcccgcatggtctgcgtaaacaagccggcgagagtgatcatgtcggcattaataacagccttccggctacctgctttcccactgccgttaccacggcttctagctggaataccgaacttatgaatgaaattggtaaagccctgggtgaagcatgtctacaggaaggcgtaagcgttatcttaggccctggcatgaatattaagcgttctccgctgtgcggacgtaactttgaatacctgagcgaagatccgtacgtgacaggcaaaatggcgagcgccctgataaacggtgtgcaatctaaaggcattggcacgagcattaagcattacgccgttaacacgcaggaaaaacgccgcatgactatcgattcggtggtagatgagcgtgcactgcgcgaaatttatcttgcgggctttgaaaccgccgttcgtgagtctcagccgtggacggtgatgagtgcctataatcttgttaatggcacctacgcgtcagagcacaagaccctgctgactgatattctgcgcgacgaatggaaattcgaaggcattgttgtcaccgattggggcgcgtgcaatgacagggttgaaggtttgaagactggcctggatttagaaatgcccagcagtaaaggcgtaaacgatcagaaaattatcgaagcagtgaaagagggcacgctgtcggaagcggtgctggatcgaacggtcgaacgtattctcaacctggtgttcaaatctcaggaaaacaaacaggcctacacgtacgacgaaaaatcgcagcatgacttagcgaagaaagcggcgattgagagtatcgtactcatgaagaacgaaaattcaattctcccgatctcccataccagttcgatagcggtagtgggcgatttcgcaaaacagccacgctatcagggggcgggctcctccctcataaaacctaccaagctggatacgatctacgacgagtttaagcagcgcgaacttacattcaactattccaaaggttacgagcgcaataatgatgacccgaacgaagctctgattaaagaagcctgtgaaaacgcgatggaaactgatgtcgttctgttattcattggcttgactgaatcctatgagtccgaagggtttgacagagaccatttgcgtgttcctgaatctcatcgtgtgttgctggaacgtctaagcgaagtaaatgaaaatattattgtcattctgtcagggggttcgccggtagagatgccttggctgaagcacgccaaagggttagttaactcgtacctggcgggtcaagcaggcgctcctgccattgccaaaattctgttcggtgaagtcaacccctcgggcaaattagccgaaacctatccaattcagctggaagatcacccgagctaccattattttgcgaagggtccgctgaccaccgagcatcgtgaatcagtgtatgtcggataccgctactttgatacagccaacaaagaagtactgttcccgtttggctatggcctgagctacacgacctttgagtatagcgatttaacggtgtcagaagagtcgatcacagattcagagccagttaaggtgaaggtgaccgtcaaaaacacgggccagatgaccggtgcggaagttgtgcaactgtatgtgtcagatgtggagagcaccatttatcgcccggttcaggagttaaaaggctttaaaaaagtttatctggaaccgggggaagaccaagtggttgagtttgaactgacgaaacgggcatttgcatattacaacgagaatatgaacgactggcacgtcgagtcaggcgagttcactattttgatcggaagttcatcacgcgatattcgtcagcgagccacgatttatgtgaaaagcagtcagccggatgtgaatgtgcccgactatagagaaacggcgccgacctattacaagttgaccgactcggagtttacgattgaggatagcgaataccaggcggtgtacggtaaagaactgcctgcctcttcatatcagaagggtgacaaatttacgatgacgtctccgttagaagatgtacgcgcgaccttcttcggccgcattgtttataacgcggcggttaaagagctcaagaaaatgacgggtggggcagactctaaccaggcacatgaaaatctgcaggtccgtatgttagaggcggttgtcaaggagatgccttttcgttccctcgtgacaatgagcaacggagccgtgagccctgcaaaagccaaagcgttactgaagctgattaattgccagtacattcgtggtttgattggtctgatgaaggtatcatttaagaaccgcaaaaaaaaatga

SEQ ID NO: 987 - DNA, 2568 bp, Artificial Sequence
  6xHis UPI0002B73341
atgcatcaccaccaccatcacgaaaatctgtatttccagggcagcatgaattctcagagcaatattgaccgactgcttcagagtctcactctggatgaaaaagtcagtctgttagctggcggctctatttttggtacagcagggataccggaaaaaggtgttccgtcaatcaaattaatcgacggccctaatggtgtacgtggagcaagcgcggatggtagcaccgcagcggcatgctttccggcggcgtgtagcattgcggctacgttcgatatcgacctcgcgcgaaaaataggtcatgcactggccgaagaagctctgagtaagaatgcacactgcattttgggcccgacaatgtgtattcatcgtcatccgctaggcgggcgcaactttgagagcttttccgaggacccctttctgtccggcaaattagcgtcacagaccattcaaggtatccagtcactggaagttggcgctacggtaaaacacttcgtggccaacgagcaggaaaccgcacggcttacagtgaacgaaattatttccgaacgtgctctgcgcgaaatctatctgcgcccgtttgagattgcaattaaagaggcccagccgtgggcagtgatgaccgcatataaccagattaatggcactcattgcgatagtaaccgctggctgctgaacgatgttctgcgcggcgaatggaaatgggagggcctagtgatgagcgattgggggggtactaatagtgtaagtgcctcgattaaggccggcttggatttagaaatgcctggccctccgagaatccgcaaagccgatcgcgtgctcgaagcgctgcgcaaacgcgatataaacgaaggcgacattaatgagcgtgcccgtgccattctgacctttatcgaaaaagcgaaagttagcgaacgttcggccatcccgctgggcttggcaattgataagccggaacatcgcgccctgatccgcgaagctggtgcgcgtggtattgtcttactgaaaaatgaacgttctttattaccgattagcaaggaaaaattgaaaggcaaaaaaattgcgatgatcggattcgccaaagatgcgctggcacacggcggtggctctgcagcggtgaacgcccattataagatcacgccgtggaacgctttgcagaccacactgtcacatggtgtgcagatgacttacgccaaaggagtgcaccgcgaacgcctgctgaaaccgattgagaaggatggcgactgtggtaaaattatgggcctcgatggtcagccgggctttacgcgcctgtactttgaggaagattcacccgccccgacctctgtattgcatggtttcgaaaggtcagcttactcgccgttaggctcacaggagagcatctggaaacacattgaaatcgttggacatttcactccgcgagagaccggaactcactacattgcctgctcgggcgttggcccaaccaaagtgttaattgatggtaacgcggtatttgaacaggatacgatttgctcggacccgatgggcgcgttttttggcgccgcccaggaacaggaaatcaaagttttcatgagcgctgaaaagagctactacatccaggtgattagttcgccaccccggaatgtgggtgtcggcatattagagggtcgcaccggcgtgcgcatgggctttgctctagaatcagaacacgatgccgacctgattggagatgctgtacgtatcgcgaaagaggcggatctggcgattgtgtttaccggccacgacccgcagtgggaaacggaaggtttagatcaagagtcattccatctgccgtgcaagggttcgcaggacgccttagtatctgcagtggcccgtgcgaatcaggataccatcgtcgtcaattcgactggagtagcggttgcgatgccatggattaacgatgtggcggcagtgttgcaagcatggtttccgggccaagagtgtggtaatgctattgtggatgtactgaccggcaaaatcaatcccgaaggtcatttaccagtgtcattcccgcgcaaactggaagatgccccggcccatggtaatttcccaggcgaatacattgacaaccgcctgcatgtcaaatacgctgagggcatttttgtaggctatcgccactttgatcgcatggcccccgattcaattaattttccttttggtcacggcctgtcctacaccacattcgatttcccggagatggccgtaaaaaaccagaccgagaatgcatttgatgtacttgtggacgtgaaaaataccggcgcagtcgcgggtgccaccattcttcaaatctatgtgggacgctcgaaaactgcacaggaacacccgatcaagtcacttgtagccttctcccgggtgtacctgcaccctggtgaaaccaaaacagtgcaactcagcgtgagcattcgcgaaattgcatacttttcagaagacctgcagcaatggattatcgatggaggggactacgatgttagtctgggccgctcggcggttgacattgcgcaggttcgtgtcttgtacatcatgcaaacctcttatgcgcgttcgtcttga

SEQ ID NO: 988 - DNA, 2274 bp, Artificial Sequence
  6xHis UPI0003DE58EA
atgcaccaccatcatcatcatgaaaacctatattttcagggctcaatgagcgatagcgtggcacagccgtctgtgacggatctgaccttagaagaaaaagcctcattaacgtcaggtgcagatttttggactaccacggctatcgaccgcgccggggtcccgtcaattatgatgaccgatggcccgcatggtcttcgcaaacaggccgatggcaatgatcacgttggtctggcgaatagcgtgcctgctacctgtttcccaccggccgttggtttatcagcaacgttcgatccggaattagctgtgcgtgtgggcgaagcccttggtgtagaatcggccatcgaaaacgtggctgtgattctgggtcctggcattaatatcaaacgctcgccgctgtgtggccgcaactttgaatacatgtccgaagatccaattgtctcgggtgtaatgggcggtgctctggtccgtggcattcagtcacgtggtgtaggcgctagcttgaaacactttgcagcgaacaatcaggaaactgaccgcctccgtgttagtagcgatgtggacccgcgcccactgcgcgaaatctacctccgcggcttccaaattgctatcgaaggcgcgcagccgtggaccgttatgtgttcctacaatcgcattaacggcgcttatgccagcgaggatccgtggctgcttaccagcgttctgcgagatgagtggggctttgaagggcttgttgttagcgattggggagcggtaaacgatcgcgtagcgggcgtaattgccggtttagatttggaaatgccatcatcgggtggagcgaccgatgcgcagctggtcgcggcagttcgtgacggctctctggatgaggctgcgcttgatgtggtagcgcgtcgtgtgctggatctggtacaaaaagccgggcgtcgtccggccattgatggacatctggatatagatgcccatcatgcgttagcacgcgaagtggcaggccgcgcaattgttttactgaaaaatgatgatcgcgttcttccactggcggctgaacagaaagtcgctgttatcggcgcattcgccgaaaccccgcgtttccagggggcgggctcgtcactgattaatcctacccgtttagatagcgccctggatggttttgcagaatatgcagcggagggtgcagtgacttacgcggcaggtttcgcccttgatggtagtggtgatgcagatgtattacgcgcagaagccgttgccgcagcgtcagcttcggaggtggcagtggtttttctgggtattcctgccagcgcggaatccgagggattcgatcgtgaacatattgacctgccagccgatcaattggccctgctggacgccgtgctcgtagcgaatccccgcacggttgtcgtcttatctaatgggggtgttgtggccctgccgttcgctgatcgagtaccagccatcattgaaggctggttactgggtcaggcagggggtagcgcaactgcagacgtactgtacggcgcagtaaatccgagcgggaggctggccgagactattcctgtacgtttagaggataacccgtcgtacggtaactttcctggtgaacacggtcatgtacgctatggtgaaggactgtttgtcgggtaccgctggtacgatgaacgcggcttagacgttacgtttccgttcggtcacggactgagctacacgacctttgcctacggcgacgcgcaggcgtcggtccgcagcgatggggacatggcagtccgcattgccgtcaccaacaccggcgaacgtgcgggccgcgaattggtgcaggtctatacggcgctgcagggtagtgcagtgcagcgtgccccccgtgagctgaaagcatttcagagcgttgcgttggaagcgggtgaaacccgtgaagtggaactcattgtgcgtcgtgatgatcttgcctattgggacgttcgagtcgatcgctgggtggttgaaggcggggaatacgaagtgcatgtcggtgcgagcagtcgtgatattcgaagcgtcgccagcgccgaagtcgcaggcgatgagctggtgttaccggcatcactgaattcgagcattacggaactactggcacaccctgtgctgggagaacggatgcgcgctctcgtagccgccgcattcggcccgggtgcggagtctgaaggcgctctgcaggttctgggctcatttcctattggacgcttagcggcctttcctaacgtgccggcgacccgcgatgaaattgaacgtatgattgcccaggcatga

SEQ ID NO: 989 - protein, 935 aa, Rhodothermus marinus
MVLLFLGGAKEGAAQSNQALQVASLRTEYLVNPIGIEVRQPRLSWQLQSDRRDVRQVAYQIQVATSREALARGRDLVWDSGRVESDQSVFVPYGGPALQRRQRYYWRVRVWDNHGRSSAWSEPAFWEMGLLSPDEWRAQWITYNWEEDTSQPQPAPMLRRTFRVEGRVRRARLYITSLGLYEAHLNGRRVGDQLFTPGWTSYHHRLQYQTYDVTDLLRPGENALGVILGDGWYRGYLTWSVRRNVYGDRLALLAQLEITYEDGRTQVVTSDPDWKATTGPIRMSDIYMGEIYDARLEKEGWTEPGYDDSDWRGVRVLEHPKDILIAPIGPPVRRIQEIRPVAILYTPAGDTVVDMGQNMVGWVRLRVRGPAGTVVTLRHAEVLDKHGNFYTENLRRARQTDQYILKGEGEEVFEPHFTFHGFRYVAVSGYPGELTPEAITGIVIHSAFEPTGTWVSSDSLLNRLQLNIQWGMKGNFLDVPTDCPQRDERLGWTGDAQVFARTAMFNGLVGGFFTKWLGDVAADQSPEGAVPHVVPNVLPSFAGRFPGGATGWADAAVVIPWTMYQVYGDRRILEVQYPSMKAWVEYMRREAGDDLIWDTGFHFGDWLAFVPEENVRRAYPGATTGRDFLATAYFAYSTRLLAQAAEVIGKTDEARHYRQLYEAIREAFNREFVTPNGRVAQATQTAYTLAIQFDLLPEHLRAEAGRRLAEDVRAHNMHLTTGFLGTPQLLHALSNTGQLDVAYTLLRQTTYPSWLYQVKMGATTMWERWDSIKPDSTFQDPSMNSFNHYAYGSVGDWMYRVVAGIDTETPGYQRLRIAPQPGGGLKWVQARYHSLYGEVASSWELVDPQTFVLEVTIPPNTTATVRLPGAQLASVQEGRQPVQSAAGVHRAYQDGADVVVEVGSGTYRFTYSPSAELVRRIQTQPEVGQPVTMSF

SEQ ID NO: 990 - protein, 1071 aa, Streptomyces bingchenggensis
MISRRNLLGTATAAGPALTGLTALAATTGKAEAAEPGYGGLRVEKTTVEYADRPLGLDAPHPRLSWQLGSDRRNQSQSAYQLRVATSPGRIGAPDVWDSGKVSSHQSVLVPYDGPKLRARTRYHWAVRVWDGQGRPSPWSEPTWWETGLGTEDEGAARWVAAPDTVTRGPDLAKADWVWYPEGDPASSAPAGTRYFRGSLDVSGSVRLARLALVADDGFTAWVNGTEIGGRAPVQENWRHPVVVDVTALLREGANTIAVAAVNASSSPAGLLGVLELTDTDGVRSLTTSAAWKATDTEPSGDWHLPAYDDGGWAAAKVLAPWGGGPWGRVRAAQRPALVRRDFRLAAKPVARARLYSTALGLYEAEINGHRVGRDQLAPGWTDYRKRVQYQTYDVTDLLRHGANAIGVILASGWYSGSVAWFGQELYGERPALRAELEVTYADGSTDRVTADTHWRCATGPILTADLMAGEEYDARLEVSGWSSPAFDDSLWQSVDVVPADTTSAVSVVAQTDAPVRVARELAAVRVTEPKPGVYVFDLGQNMVGSVRLRVRGEAGRTVRLRHAEVLDKDGMLYTANLRTAQATDSYTLKGSGTETFEPRFTFHGFRYVEVTGYPGTPDTKSVTGRVMHTGAPFTMSFTTDVPMLDQLHRNITWGQRGNFLSVPTDTPARDERLGWTGDINVFSATAAYTMESARFLAKWLRDLRDGQSDAGAFPDVAPRIGNLGEGTAGWGDAGVTVPWNLYQAYGDRQILADNFPAMRAWITYLEQHSSGCLRPAEGYGDWLNVADETPKDVIATAYFAHSTQLVAKAARVLGHDPAPYDTLAAKVREAFNRAYVSADGTVKGNTQTAYVLALSMDLLPDSARTPAAERLVELIRSKDRHLSTGFLGTPRLLPTLTATGHTDVAYQLLEQRTFPSWGYQIDRGSTTMWERWDSLRPDGSFQDPGMNSFNHYAYGSVGEWMYQNITGIGMGEPGFRSIVIRPRPGGDVHEANGRYDSLYGPITTRWTRANDGAFTLDVSVPVNTTAEVWLPAATSRAASGISHAGATFLRLDDGCAVYGVGSGPYRFTAP

SEQ ID NO: 991 - protein, 951 aa, Spirosoma linguale
MKFARLNTLTVWLITSFITVSFTISEAISADLTPVNLRTEYKRNPVVDVDKPRLSWELTATGRGQIQTAYQILVASSAALLNAEKADLWQSAKVAGNATNQIEYSGKTLLSRTVCYWKVRSWDKNGQPGPWSAVATWEMGLLTKADWKADWIGNDLTALGKGKTYHLPPSPFFRKEIQLTAPVKKARLYVTSLGLYEYQINGKRIGNDYFTPGWTDYNKRVYYQTYDVTADVKPGKNALGAILADGWYAGYLGYALLVGNPVVKNFYGNVPLLKAQLEIEYTNGKTETIATDQSWKTSHGPILEADILNGETYNANLAFDNWSKTGFNDAGWKNSTIFPDKPDRQLEAYPGNPVRVFQELKAKTVTPKAGGHYLFDLGQNFAGMVRLRVKGNKGDTIRLRFGEVLFPNGDIMTENLRKARATDTYILKGDPQGETWTPKFTYHGFQYVDVAGFKSAPGLDAITGIVLTSATPETGSFETDNKLINKLYQNIVWTQRSNYVEVPTDCPQRDERLGWTGDAQAYVQSATFNNDISAFFTKWLVDLNDAQRPDNAYPIYAPAPNVRKTDTYSPGWSEAGIICPYTIYKTYGDTRVIQKFWPNMVAYLKFMEAKSQGTYVYKEGSFAEVSPKGGFGDWLSVGKKTPPDMLATLYFGYAASMMADMAKAIGKPDEATYYTTMFTKIKQAFRAHYTDETGRFKTNSAAYGNGEGYVDGEMGFEGHTQTAYANAIYMNMIAPDLTPKAGNWLVDLIKANDNKLSTGFLGVKPLLPSLSMTGHSNEAYKLLLSTEYPSWGFEVVNGANTIWERWNSYIKGKGFENNAGMNSFNHYAFGSVNEWLFGNAAGIKAAEAGYRTFIIRPELAPQGINFVNASYRSINGTIVSSWKKEGNRVRMKVVVPANTTATVFIPITKPDSVLESNKALTASQDIRVIGARDGYLQVTVGSGTYQFSAVN

SEQ ID NO: 992 - protein, 931 aa, Roseburia intestinalis
MGKIYAAKTNHITNPIGFNMDSIAFSWKVKGCRGQEQKYARIVISKNKTFTDICYDTGETELDSLSTRVEFEIQPYTRYYWKVIVTTDVEEVIESDVQFFETAKMDEPWTGRWITCDSSQERHPIFSKRIEPKKEVKSARLYICGLGLYEAYFLGENKENPKKIGDEYLTPYCNNYDRWIQYQTYDITEQAERGGVLSVLLGNGWYKGRFGFNDPEREAYYGDEWKLIAEVHIEYKDGTKDVISSDETWSVTRSNLWFSNIYDGERRDDTLPPVEESPARIAKAPKGRLMERLSLPVKVQEEMKPAELIHTPAGEDVFDLGQEITGIFQLRVNEPSGTIIRIQTGEILQDGCFYNENLRTALSEYVYVSDGMEKVIIPHFTYYGYRYVKVSGVTNLSCEDFMAIVLYSDYESIGTVETGSELVNKLISNIEWGMKGNFLDVPTDCPQRDERMGWTGDTQVFSATASYLADTYAFYRKYLYDLYQEQLLAGGMVPEIVPTFGPTKCSCAWGDAACIIPWNVYLFSGDKTILENQIESMKAWVDYIRRIDGDHHGWRQVFHYGDWLALDRTGAAANSVYGATDEAYIADIYYAASAQIVAKAAEVLGLEETRQEYHKIADRQWQVVKEEYFTATGRCAVKTQTGLILALKYHLSENEELTREMLKKLLRDNKNKLNTGFVGTPLLCNVLTDHGMTDAAYRLLLNEEYPGWLHEVKLGATTVWERWNSLDESGHVSSTGMNSLNHYSYGAILEWIFRHAAGIDVMEQSPGGKVMRISPKVNSELKYVKAVYDSATGCYQCGWEILEGNKITITVTVPFGGKAEVVLPYAPECIYEDIENPLFEAVENGICHVKAGEYEVVYEASEPLKKRYSIDSTMEELLNHPDIRAFLSQMVEVDMIPDIAYGLSLRDVAKTFAGEIKPDEAQMLDKALAKF

SEQ ID NO: 993 - protein, 908 aa, Draconibacterium orientale
MKKLLLCLCFLAIGFLSNAKIKPTQLTCEYLKNPSVVDVLQPRLAWINVADAGERGQEQTAYQIRVASLKEKLENADLWDSGKVKDDASIRVKYDGEKLVSRQDCWWQVRVWDKNNEVSEWSEPAYWHMGLLNENDWTANWIGVPWQGEETLPKPASPAATLPGELPPPAPLFRKEFNATKQVEKAVAYVTGLGYFELYLNGEKVGDDVLVPNQTNYGKRPALTQQYIPLDDNFKEYKVMYLAYDISDQLVSGANTFGAILGNGFYNPSKHWALGYGTPRLLVQVHVAYTDGTEELIVSDESWKVSKSPILMDMVYYGEHYDARLEQDGWCSAGFDDSAWENAILRKAPEGKLVAHTAHPDKVYETLQPVRIEKMYNGNYKVDFGEEISGWVRLKNVEGPEGHKVKINYLSNNYSGDNSYIFKGEGKENYAARFNWFVFREVEIENWPGVLAPENICAEAINTYIEESAHFETSNPLFNQVNKIWKRSQTDNMHGGIASDCPHRERSPYTGDGQVACVTVMHNFDAQNFYYKWIHDMIGAQNVKTGYVPNGAPWQPGCGGGVAWGAAINIIPWEFYVHYGAVDMLEEAYEPMKEYVRYMQTWVNNEGIMNSQRVGLDGNVLQWFNLGEWVTPGDLPPDSLVHTFYFWRCADITAKTAEILGKRKEAKRNRELAETTQSAFHKCFFDAEKGTYGNAGANIFALKMGVPENEYQRVINALKANIKKNKGHLDTGIFGTQFFFEVLSENGLHELAYEAMNKKEEPGYGRWLTLGATTSWENWNTDGSHNHPMFGGGLVWLYRKLAGMQADEKNPGYRHIIFHPQPIKELEFAEYFNKTPYGKAGIKWQQTEGKLSVGVTVPVGCTATVILPGGHFLADGKAMEKVAEVQLVSQKEDELIIKVGAGNYQFSN

SEQ ID NO: 994 - protein, 1107 aa, Catenulispora acidiphila
MLIRRRFATALALILAFAAVTPVASAAPSPSLSLSASSAGTEVSVSALQTDATTNPLGIDDPHPSLSWKLASQINGEYQSAYRIVVAGSQSDASAGVGSVWDSGEVASGNSVGIAYGGPALASEKTYYWAVQIWDEHGTASGWSAPAQWEMGLLNPGDWQGAQWISPTSASAASPLLRKDFTLAKPVARARAYVFGLGFYELHLNGGKVGDRVLEPASTPYAQRDLYAAYDVTGTVKQGGNAVGLWLGNGYDANFSQYGFRWLGPKQAIVLIDVTFSDGTHQAVTSDGSWTWSPSPITADGIYNGESYDARMVQPGWDAAGFSASSLQPVRTVAAPGGSLVADAMPPIRVTQTLNAVKLTSPSPGVYVYDFGQNVSGWEVLRTQGAAGSTVKMQTAEDLLANGTIDTTTNRNALSTDSYTLAGTGSTETYEPRFTYHGFRYVEVTGDPQTPVVSSLQARVVHADLASTSTFSSSDATLNQIWQNNQRTMLNNQMSTPTDNPVRDERTPPGMDVQAYHDASTAEFGMDTYYANYLRDMPPGTALPSDGGNAQQPDMGGDQVTLAWTLYQQYGDIATLAAMYPLMKKFVDTNATNVPGHIWSTGFGDWCPPDHSSNANGGMGNPSAGACTSEVPIVNTALSYLQASDVAKAATALGQAGDAAHYTQLAGDIANAFNAAFLNSDHASYGDGRETTSILPLAFGMVPAADVPAVGARLVDTVVRGNGGHLDTGIFGTRYLMDALAGIGRTDLAMTVLDQGTYPGYGFEIGKGATTDWEEWTYASSMESHDHAMFAGINASFASRLAGIEPTGPGYSTVSIAPQIPAGLQSVAASVSTVRGTVASSWSVSGGKVTMDVTVPVGATASVRVPSFGQGSVTTVSPAGAGAVQVSAGGTSSTYTVGSGSWEFTGSLVPASSTVLPGTWTQCAVETGNCSVAGTETVAFGAQGKYDYATVSGTVACSNTVFGDPDSGVSKACYAEPAPATTPGAWQQCAAETATCSFAGTETVAFGAQGKYTYATLTGGTPCTTTIFGDPAYGIPKSCFIEAPPPAATTWIPCAAETATCTLTASRDVAFGAHGDYAYRTANAPTTCTNAVFGDPAPGAVKACYLQ

SEQ ID NO: 995 - protein, 729 aa, Bacteroides thetaiotaomicron
MILLGALSLASSTFAQTWIWYPGDYEIWLGNQMNNRRTERGAFFPPFWKTDSHYVVVEFSKVLNLSEPEEVFIAAEGTYNVKLDGKLQFGMPETLLLPAGKHSLNIKVWNQATPPTIYVKGKTVNSDSSWRVTYEDKEWIDESGKASDTSATIYMDAGCWNFDGATQRPSQFSLMREPQQPVAKTEQPEGGILYDFGKETFGFITLKNLSGKGKIDLYYGESPEEAKDKAYCETLDKLLLEPGQITDLAIRSTSPLHHSDNEYTLENSKAFRYVYITHEPEVQIGEVSMQYEYLPEEYRGNFRCNDEELNCIWEVGAYTMHLTTREFFIDGIKRDRWVWSGDAIQSYLMNYYLFFDSESVKRTIWLLRGKDPVTSHSNTIMDYTFYWFLSVYDYYMYSGDRHFVNQLYPRMQTMMDYVLGRTNKNGMVEGMSGDWVFVDWADGYLDKKGELSFEQVLFCRSLETMALCADLVGDKDGQQKYEKLASALKAKLEPTFWNNQKQAFVHNCVDGRQSDAVTRYANMFSVFFDYLNADKQQAIKQSVLLNDEILKITTPYMRFYELEALCALGEQETVMKEMKAYWGGMLKAGATSFWEKYNPEESGTQHLAMYGRPYGKSLCHAWGASPIYLLGKYYLGVKPTKEGYKEFAVSPVLGGLKWMEGTVPTPNGDIHVYMDNKTIKVKATEGKGYLTIQSRRQPKANMGTVEKVSEGVWRLWIDSPEERIVTYRL

SEQ ID NO: 996 - protein, 991 aa, Opitutus terrae
MHRRFLAAILLGAPALLESAAAAPETPAAPPPAAAQPLAWPEVHRETKPWSRWWWFGNIADEKSVTAQLEACAAAGLGGLEITPIYGVRGYEDRFVPFLSPRWMELLRHTLVESRRLGLGIDLATGTGWPFGGPWLQPEDVAHTLAHRVYEIKPGERLGEPVRLTATGLVRVAGPRPVKLEELREPITANANLQELALDQVRFPKPMRLVSLMAFPLALAGVAPTPLDLTSRVRADGSLDWTAPADAGTWTLYALFAGPHGKMVERAAPGGEGFALDHFSSTALRAYLARFDAAFAEGHLLSDLPSAAGADSAPRLRAFFNDSYEVDDADGEANWTPRFLEEFQKRRGYDLRAHLPELLATTENDFSARVRSDYRETISDLLLDEFTNPWREWAHQHGALIRNQAHNSPANILDLYAASDIPEQEGNGFLAMKLASSAAHVSGKPLASAETATWLNEHFLTTLAELKQNTDEFLLAGINHVCYHGTALSPLDAAWPGFNFYASVELNPLNPFWRDFTALNAYVARAQSFLQSGTPDEDVLLYYNIHDRWAERGNGRMPHFGHGGRDPSGSLAATAAALHEAGVGFDYVSDRQLQKITPDRAIVVPQTTFMPEATLARLVELAAQGATILFVDHLPRSAPGLAGLNASGRFEQLLQKIQTQLAPSDVLSAAKLDGGQFLLGPGIRELLDRCPGIARESLRPFGLEFVRRRTDAGALYFLVNRSNQPIDRWIPLQSPAAAAALFDPMTGNAGLAAIHSSGPTGSASIPPAHSDGARASRAPTEIYLQLAPGESCVVQLHATPVAGPAWHYWQRAGEPHLLTGDWSVTFTAGGPALPAAAQLHALTSWTDFAGEAGRAFSGTAVYTRRFARPSGDAPAWELDLGTVGDSARVTLNGRELGVLIQPPWRVVIPANEWRDENALEIDVTNLAANRIADLDRRGASWKIFYNANFPARFRENVGPDRQFTAARWLPRNSGLLGPVKLTPLQKSDPTL

SEQ ID NO: 997 - protein, 897 aa, Lachnoclostridium phytofermentans
MKSFIKELIEQKEGNYILPFFWQHGESEGKLREYMEAIHSCGIRAVCVEARPHPDYLGPGWWHDLDIIIDEAKKRDMKLWILDDAHFPTGYAAGKIAESEDKYCKQYISRKFIDVSGPTPEVEVNLAAMMMPIMLPSGLNLEMFGMSSEKKRYFTDDRILSIRAYQMDKDSSLIGEGIDLTTNIVNGKLIWDVPKGTWRINVLFITRNGEGRCDYINMVDKDSCRIQIDAVYEPHYEHYKEEFGKTIAGFFSDEPCLGNSIGYNFDESIGKKKTPLPWSSQLEKMLEEKLGKEYLPYYPALWTDMADEKVNARVRYAYMDCVTRLVEENFSRQIGQWCEERGVEYIGHIVEDNNQHSRLGSSQGHFFRSMMGQHMSGIDNIGDQVLPGGENHKREALLGADKDGEFYHYELGKLGSSLAHIDPKKQGRAMCEIFGAYGWRLGIRTMKYLMDHFLVRGINVYVPHAFSPKDFPDSDCPPHFYAGGEDPQFNYFKKLMHYTNRMCHLLNGGTHIAPAAVLYHGEAEWTGGCMFNQKVARELLESQIDFDILPSDVFADMSAYNATFDGFLQVNGESYDCFIVPYAEFITKEVAVFAGTASKKGFPVFFVQGLPESICNIDKKEEEKLLLDGMSECIVVPLEALSKTLKDNKLFEISSDNQFDGLRYYHYRKEQTELYMFSNESIGKEYNGWITVKSKGEVSLYDAMDNRIIPAEYRNTEDGTSIHIRLTPYQSVVALFEDLKEVEDQGNFEAKPGYRLDAAWRISSAEVSKYPEFQPVEVTTELKSMGRVLPDFSGYLRYESEFVYDRMPTGRELLNITDVYEGAEVWLNGHCLGMKICPPYQFPLGEALRAGENHIRIEVATTLDRKVKSLPQDMRSLMFYSKITEPTGIVGSVEIWN

SEQ ID NO: 998 - protein, 739 aa, Rhodanobacter denitrificans
MLSIALAAALAAGAVAPDWHDGLDWHGVHVAISRDAQQGYTLAWPYGQRTIAAQPLATQTASPLFDGLFAMAQDDLKQDSVSAIRDGAFDHGQPIPCQCFETGLKWPYVWTRDLSYAIDLGLWRFDPARSRNGLKFKLSGVRVASAPQGPAPKRLYPMQDTGSGGSWPISTDRVVWFLGARHLLDDQAFADDVYRALDATLAQDRQYAFDAGFGLYRGETSFLDWREQSYPAWTADEVTFIAQSYALSTNVLHYQALQLAANLADTHHDAKAAAGYRADAAALKAAINAHFWRAERGMYMSYLSGDGTPYDSYDLLGIALAIDSGVAGGERAKQALANYPTWPAGSPVIWPERADQPIYHNRAIWPFVSAYALRAARLTEQPARIAHEIESVLRGAALYGSNMENYELLTQGQHVDEGKLSGPVVNSPRQLWSVAAALAVVTEGVFGLNEDGSVEPKLPTALVPMLFGQRRTITLDLHERQITLQLPEKISGNLLVADRTRTQGTATTVTLKAVQVPDAPLRTDAPLYAPLAPAAPVVQAAGNGWRVSAEGKVRLYLNGRAHGDIDGTATLPRQPGLTCFSATRVDAHGLESLHSPDTCVGETAKVNGSWPRRWTAPATGRYRVALDYANDHGPINTGITAAVKMLEVSCAGSDPQRLPIVMPHSVRAQRSTWGTFTAQAGSACRFALDDGFNMSYLAHFAHYTANNGSGGNGGSSGPLNQAEVHALLIAPLAADRGTP

SEQ ID NO: 999 - protein, 804 aa, Prevotella ruminicola
MRKFLTIICVACCYASATFAQAWPQPKPEAKPGTRWWWLGSAVNQRDLQWNLQEYARAGIGAVEITPIYGVKGNDANNIAYLSPQWMQALQSVQDIARPLGIEVDMNCGTGWPFGGPHISLDQAACRAIIKDTIINGKHQYEVEIGHTKQKVKRAAPGGEGWVVDHFDRNAVAHYLDRFEQAFATSGVPYPHTFFNDSYEVYKADWTPTLFDEFQKRRGYDLRTKLPELLGKVDDGNQTLADYRETLSDMLLENFTQQWVAWAHKHGVKVRNQAHGSPANLLDLYAAVDIPEIEGFGLSEFGIKGLRTDPGKTRKNDSDVSMLKYASSAAHVMGKPFTSSETFTWLTEHFRTSLSQMKPDLDLMFTCGVNHVYFHGSCYTPQNAAWPGWKFYASVDMSPTNSIWRDAPFLMKYIERSQSFLQLGEPDNDFLVYLPVRDMWHQRDNNNTLLMQFDIHSMAKKAPQFIRSILTIDSLGYDCDYISDRQLAKVRMQDGMLVTEGGTRYKALIIPSGTTIDASLQAQINRLNAYVIRGEQAADMAKFAKAEQMKTTYGLRAIRRHTADGWHYFIVNLTPKDITGDVTLAVPFESATWFNPMNGDIQPAEVHNGQLHIALKSGESRILQTSNQPSTNITTTASGTEEITLQGPWVLSFTDESPRVEGTFKLNKLQTWETLSDSAAVTMGTGVYTTSIKLSAQQAKQHWQIDLGDVRESARVYINSQFVGCAWAVPFILDCGNTLHKGKNEIRIEVTNLPANRIAELDRKGVQWRKFNEINVVDINYKNTTYADWKPVPSGLNTTVKLVR

SEQ ID NO: 1000 - protein, 871 aa, Aspergillus terreus
MALSISQVAFEHHRTALGIGETQPRVSWRFDGNVSDWEQRAYEIEVKRAGHDADVFRSESSDSVLVPWPSSPLQSGEEATVRVRSFGSDGQHDTPWSDAVTVEPGLLTPDDWHDAVVIASDRPTEVDATHRPIQFRKEFSVDDSYVSARLYITALGLYEARINDQRVGDHVMAPGWQSYQYRHEYNTYDVTDLLKQGPNAIGVTVGEGWYSGRIGYDGGKRNIYGDTLGLLSLLVVTKSDGSKLYIPSDSSWKSSTGPIISSEIYDGEEYDSRLEQKGWSQVGFNSTGWLGTHELSFPKERLASPDGPPVRRVAEHKLANVFSSASGKTVLDFGQNLVGWLRIRVKGPKGQTIRFVHTEVMENGEVATRPLRQAKATDHFTLSGEGVQEWEPSFTYHGFRYVQVDGWPADTPLDENSVTAIVVHSDMERTGYFECSNPLISKLHENILWSMRGNFFSIPTDCPQRDERLGWTGDIHAFSRTANFIYDTAGFLRAWLKDARSEQLNHSYSLPYVIPNIHGNGETPTSIWGDAIVGVPWQLYESFGDKVMLEEQYGGAKDWVDKGIVRNDVGLWDRSTFQWADWLDPKAPADDPGDATTNKYLVSDAYLLHSTDMLANISTSLSKGEEASNYTEWHAKLTKEFQKAWITSNGTMANETQTGLALPLYFDLFPSAEQAQSAAKRLVNIIKQNDYKVGTGFAGTHLLGHTLSKYGESDAFYSMLRQTEVPSWLYQVVMNGTTTWERWDSMLPNGSINPGQMTSFNHYAVGSVGSWLHEVIGGLSPAEPGWRRINIEVVPGGDLQQASTKFLTPYGMASTKWWLDGQDQSCGGFDFHLVAEVPPNTRATVVLPGKGGEKVDVGSGVHEYHVRCVKL

SEQ ID NO: 1001 - protein, 774 aa, Brachybacterium faecium
MNSAPASPADTPSAGAGRPAAQLQDALAITAVEDTGRLPQLVHTVTLAQPRDQVRRAELLATAHGLYEMRIGGAPATESVLNPGWTTYERRLQVQRLDVTAQVRQRPEGLAAADADRLDLEATLADGWWRGDLGFDGGVRYGDDLALLAAVEIEFADGTRQRVVTDESWRSRPSAIMSANIYHGQHEDRRLGLGPETPVRVVEIDRSTLVEQVSPPVLRHESRRPERIWTSPAGRTLVDFGQNLVGWLRFTVTGPEGTEIVLRHAEVLEDGELGTRPLRAARATDRLVLAGDPAGETFEPTFTFHGFRYAEISGWPGELAAEDLEAVVVHSALRRTGWFECSHAGVNQLISNSLWSQRGNFLSVPTDCPQRDERLGWTGDIAAYAATAAFQHDVGDFLHGWLLDLGQEARMNPHGIVPFVVPDLLKPGLGAGDPAAADEGWGTPTAIWGDAAVWVAEALWTAYGDLDRLRAHYPAMVRHLDSVDRALSPSGLWDTGFQFGDWLDPDAPPEAADRAKADKGVVATACLVRSARFAAQAARLLGEEVDARRWQGLAERTLAAFTTAYVHENGTITSDCATVYALAIAFDLLDAGTRPRAAARLAEVVAEAGHRVSTGFAGTPFVTWALSETGHVEEAYRLLLEEGCPSWLYPVSMGATTIWERWDSMLPDGSINPGEMTSFNHYALGAVADWVYQVVLGVRPAAPGYRRIRIQPVPGPGIEWAEGAHDSAAGRIEVSWEHSADGLRGTATIPEGAEAEIVLPDGRARTVGPGRHSF

SEQ ID NO: 1002 - protein, 926 aa, Flavobacterium johnsoniae
MKNFKNILLGLSFLITFISNGQILPVRLTTEMAENPLAVIENQPKFSWQLISKESDVSQVAYLILVASSEEKLNNDDGDIWNSGRVNTDKNLHIVYSGKPLKSETKYFWKVKVWNQLGKISKWSKTASFRTASLESDLNPIWIGAITKADSHLPEGRNYHTATFNREKKMSFINASDSLARRSIMLRKPFEVEKAVKEAVVYISGLGHYELTINGKKVGNSQFAPLWTDYDKTVNYNVYELSAKEFQKGDNVIGVLLGNGMYNTLAERYTKFFVSFGPPTLFFKMKIKYNDGSEEIIKSDRTWKYSKSPITYNSIFGGEDYNANLEQKDWNRKGFKDRDWKKVVIQEAPKGILRPQTAPPVTIQKQYEVKTVKELKPNFYVFDMGQNLSGFPTIKVKGKRGQTIRVWVAEGLNEEGTIAQGRSGKPYYYDYTLKGKDVEEWTPKFSFYGYQYVQIENINYKEDKNKEFPTLVDLKSNFIYNSAGEAGSFACSNEIFNKTHELINNSIKSNFQSVFTDCPQREKLGWLEEIQLNGPSLMFNYNLQTFLPATMQNISDSQRENGLIPTIVPEYVIFGGDFTDSPEWGVTGVILPWMYYEYYGDASLLEKYFPVMKNYVDYLGTKATNHIVSHGLGDWYDYGTHPAGYSKNSPIALSATSHYYYGAFLVAKASKLLGKTEDFEKYNTLASEIKTAFNAAFFNEETKQYGTSSQFSNAVPIFMDIVEPQYKEAVMQNLLADIKEKGDRLTTGDVGNRYLFQTLARNGENETMYRMHNHYDAPGYGFQIKFGLTTLTEQWDPRKGNSWNHFMLGQIEEWFYQSLAGIMSDPEKPGFKHFFIQPEVVGDMTFAKADYQSVYGKIASSWEKKDGKFILTVQIPVNTTATIKLPVAKNSEIKMDGKRVRAGFDEKAQKPVLELGSGIYTIECTI

SEQ ID NO: 1003 - protein, 885 aa, Rahnella aquatilis
MPAVIRLTLNQESALSGVQQLPVLGWEIESRNRNVRQTAYRLQISQDQDFDNILLRGEWQESECSNNIPLTELMLTSSQHYFIRVQVRDNYGETSGWSSPAQMITGVLYPHEWLADFITAETSADKDNSHATLLRKSFVLNRAQDIQSAFIHVSALGLYELYLNGHKAGEDALTPGWTSYHNHLLYQTYDVTGHLEKGENVIGAILGAGWYKGDMGFSRHRNYYGERSALISQLVINYNDGSQEIVISDESWKGQDSAILFSEIYDGEIYDARREIPGWCTKDVSGEGWRPVSLVTHEKSTLVAQGSNTVRKMAEIKPVALITTPQGDTVIDFGQNLSGWVEFRVSGKAGDEVVLRHFEVLDADGNVYLDNLRTARQRTAYVLKGEGEEIWHPHFTWQGFRFVKVEEYPGQWDLNNFTAIVLHSAMEQTGHFACSNPQLNQLHHNILWGLKGNFVDVPTDCPQRDERLGWTGDAQIFCRTASYLMQTRNFFAKWLTDLRYDQTPEGGVPHVIPDILTGYCGKDRLLSEGGTHSASAWADAAVINPWTMYLMYGDTCVLENQYASMKGWIDFMTAHAENHIWHYKLQFGDWVALDAKEGSYFGATPNDLTCTAYYAYSTQLFAKAAKVLNRTEDYDHYHALYQAIVRRFQEAFFTPSGQLAARTQTAHILALYFNLVPDEFRQRTTDTLVELLNEHDGHLVTGFVGTPYFCHALSQNGRTKEAWNLLLKEDFPSWLYQVKAGATTVWEHWDGIKPDGSMWSADMNSFNHYAYGAVGEWLYRVAAGIEADEAQPGFKHFIIKPLTGGGLSWLDTRYQSIYGAIGVRWEVSGQTVFLNVTVPANTSATVVLTDGQSVQEADGIDFARCAEGYTAEVGSGEYRIEYRLV

SEQ ID NO: 1004 - protein, 887 aa, Bifidobacterium moukalabense
METQVIKPIAVGDLQITRFTIEHFPGDALGIPTATPRMNWTYSRAVPDGSQILLKISRRVPGSPAKEECTYLPPEDNVLVPWQFTPLASREEVFATVQLVSAAHKPLSDPSATLHFEAGLMQEYEHVADFVGPSWAEPETDHRHLPLIRTEIAIKAKPKRARLYLSALGLVEAEINGVKIGNDALIPGWTNYEQRVQCWTYDVTGELNEGANAMGFWLGDGWYRGRLGFDGGYVNYYGDRLGVFAQLEVEYEDGGIEHVYSNAWDRQWKASLGPIVCSDLCEGERYDARLEQPGWSEPGFDDSSWKPVAEIFYDPAKIENPDTSPVRAQEINEPVSITRTGDTPDGRGIWLVDFGQNCTQRIHLHVKGLEAGQSVELHHVEVLEPNGEIATRTLRRGQQHDIYTSNGTDAWWEPRFAMHGFRYAQIEGVAGELTAADIECHVYHSVMDRAGELETSNPLLNRLHANALWSMRSNFVSVPQDCPQRDERMGWTGDICLFAPTAAYLYDVYGFLKSWLKDVRADQVKWGTVPFYVPFIPLGGWAHPQAISTWGDSAVEVPWVLYMESGDPQILADSYDLSRDWIDEVAGYLSPDGVWDRRPDYVLGQLGDWLDPTAPPDDPTQAMTEKELVATAFFARSCAQAEQIARILGNNEDAVRFGDLRRHVTSGFLARFTNLDGTMTSDTQCAYALAIAFGLLDGEPVRRVKAGNRLAKLVRESGGKVSTGFAGTPFVLPALTMTGHNEEAYGLLLSEECPSWLYQVKMGATTTWERWDSMRPDGSLNPGGMTSFNHYALGSVAEWMHAHIGGLEAIEAGWKRFRVAPVIGGGLDHASTSHVTPYGKASVAWKTSAEGVELDVTVPIGATAVVELPDHEPTELAGGTHHLVVAL

SEQ ID NO: 1005 - protein, 778 aa, Enterococcus casseliflavus
MTKKWQATWIEPQQEPTRKEPPFSLADMFSGKKVVQDPPEERLLPPHYLKKIFTVENKSIKQASLTMTAHGIYQAKINGQAVSEAIFAPDYTSYTQYLQYQTYDVTHMLKEKNVWSVTLADGWYAGRVSVSGGSAQFGDRLGILGEIEIYYTDGTYEIIVTDEDFVSSHGKYVYSDLFIGEKQDLRLEKENWETDFDLTGFTKVSKADYGFDHLTPQRGPQVKRQEKLAAKSIWWEKDAVIVDFGQVIAGRVQLQIPLADGQEITIEHSEVLDREGHFFNNIVGRNKDQKDVFIGNGREACLEPDFTFHGFRYIKIDGLDVLPDKQSVWAYAIYSDMKATGSFTTSNQKINQLIENIQWSQKGNMLSIPTDCPQRERVGWTGDIQVFGPTATFFMDVYDFLGRWLDNVRLEQQADGQIVDYTPAPRDYFEGESLTGSLSSAGWGDAIVLLPWTLYQRYGKLEILVENYQAMKRWLSFSRKSAAGDKTDDKQYLWDTKFHFGDWMFPSFMIGEDAKGPMETAFVTKDLFGTAFLAHSSQLFAQISQLLDEEEENWSDFSNKVKAAFQKYYWRDDHLTADFQGSYVIALAFDLLDETASKAAAARLTELIIANNYCLDTGFLSIPYLLDVLCDYGYQELALKLLLQEECPSWLYEVNHGATTIWESWASIQPDGTVCDFSFNHYAFGCVGDWLVRRLAGLQVTEPGFTFFTISPLEQTAISSYHLNYTTAYGDIEIERSNDQFHLSVPQNTKAIFQYGETSKVLTSGKHHLTIKGEKIYE

SEQ ID NO: 1006 - protein, 899 aa, Unknown
  Geobacillus sp.
MAAIKATDLRTEGILNPFGLDAERPRLSWSFGQPAGAGSGQSAYRIAVASSEERLKLGEPDVWDSGIVRSCEHVSIPYEGASLMPRRRYYWHVTAWDGQGQPAVSKAAWWETGLLAEAKWSERWIGDAAEAADRGPMIQLRKSFEVKKPVARARAYVTGLGHYELRLNGAKVGDRQLEPGWTNYDKTVLYSVYDVTPGLRQGENAVGVLLGNGFYRVAGGRYAKFKGSFGNPKCLAELVIEYADGTAETIVTDGTWSLSDSPLTFSCIYGGEDYDAGLERTGWDGPGFVEDGDWRRACELEPPPGKLTAQSSPPLAITKRLPARSVSEPRRGVYVYDLGQNFSGWPCIRVSGPNGTRVKLKPAELLTEEGLANQKYSGSPYELNYVLKGEGIEEWHPRFTYYGFRYVQVEGAAPAGEGVEESDLPVLHGLEGHMIGPDVEDAGGFRCSDPLLNRIHEIINWAILSNMKSVFTDCPHREKLGWLEQLHLMGPSVMFNYECEALLEKIMRDMSDAQLPNGMVPTTAPEYVVFEEPWHMFRDAAAWGGSYILLAWEMLRRYGSVGTLERHYEGMGRYVHYLTEASDGFILRGGLGDWYDIGPKGPGFAQNTSVALVETAIFFGLARALGEIALVLGKAEDASAHSRLSESIRTAFHSAFYDTANAMYAEGSDTAIAMPLAIGLAPEELRGVLLDRLVRNIGERGWQTTAGDVGHRYVLSALASGGRSDVVGKMARNPHAPGYAYQVAHGATSLTEAWDGPTVGKSQNHFMLGHLEEWLYASLAGLDYRYRPEVGRYLVKAKPTVVQGVEWAEAWQQLRSGRASVRWELGPSNQMTVRVDIPANSEGLIRIPSSPDTPVLASGPDVAYEGHEDGHAVYRSGPGSYCFTFAANHRTTEMERERM

SEQ ID NO: 1007 - protein, 871 aa, Modestobacter marinus
MSDPTVTVVRLRTDDDSGLTATANATPRLSWSLAADRSGVLQRGYEVQVAPDPGFADPVSSGEVDSDVVVDHDWPAAPLTSRQVAYWRVRVRTDQGWTAWGEPACVEAALLEDADWTARPVFLAGDRGRDGVGPAPLLRREFELPAEPVSARLYLTALGVHRTTLNGRPVGDELLEPGWTSYRDRLLYATHDVTALLRAGRNVLAGSVGDGWFRGNLGWDRLRDFYGDASALLAQLEVRCADGSTVTVSTDEHWRGGYGAVRAADLYDGCDIDLREEPVGWAEAGFDDAGWEPVGTLPLPAGLSQRALPPVRVLQEIEPQVSELSDGTLAVDAGQNVTGWLRLRVTGPSGARVTVRHAEVLDEKGRLVTTLLRSARATDTVVLAGGTADLEPEFTFHGFRYAEVEVPPGVTVDAVRVAVVASDLRRTGQFSCSNPRVDQLFSNVIWSQRDNFLSIPTDCPQRDERLGWTGDIMAFAPTAAANFDSRAFLDSWLTDVGIEQLPSGGVPMVVPNCLTGEFPSPLPQADGAAGWADAVTVVPAALFRAHGSRDLLRRHVGSMQRWVDYVAGLLAEDGTWSGYLQLGDWLDPNAPPERPFEAVTDRDYVATVFVAHSARLLAATCRELGRGPDADRYAALGDRVAQAAWAKWADLAPTTQTGCALAIVFGSAPDAELPALGDALAGLVRASGGRIGTGFLGTPFVLPALTATGHLAEAYQLLLNEECPGWLYQIRHGATTMWERWDGILADGSVHPGQMADGSTMSSFNHYAYGAVASWLYESVAGLSPAAPGYREVLVAPQPGGGLTRAAASIETEYGPASVGWSTDGATLTVDVTLPPGTTGRFAVPAGWSPQQPVALLGSGQHTLLLTGAGA

SEQ ID NO: 1008 - protein, 1070 aa, Pedobacter heparinus
MNLKTTGIVLVLSTIVCFPCIAQKNLEQSFKVTPDTIQTSVYWYWMSDNISKDGVVKDLYAMKSAGINRAFIGNIGYETTPYGKVKLFSAEWWDIMHTALKTATNLNIEIGVFNSPGWSQSGGPWVKPAQAMRYLASTKANFVGPKQLNVQLEKPKGYFQDVRVIAYKTPKAYGNSIAVHKPKLSSSISVQNINNLIDGSENTTVDIPATESITIDLETSSSFTARSLVVYPAHKGLNVNVELQVKKNKEYVSVKTFSVNRTNSNLHVGFKPYGPVAVSIPPTIGHSFRLVFGKSGGFGLAEVVLSQTPVVESYTEKTLAKMFQSPLPYWNEYQWPDQPLIDDLSLVIDPKTVIDITTFMNAEGQLKWDLPAGNWTIMRTGMLPTGVKNGPASPEGTGLEIDKMSKEHVANHFDAFMGELLRRIPAADRKTWKVVVQDSYETGGQNWTDDMIEKFKASFHYDPLPYLPVIQGEVVGDQNQSDRFLWDLRRFIADRVAYDYVGGLRDISHKHGLTTWLENYGHWGFPGEFLQYGGQSDEIGGEFWSEGELGNIENRAASSAAHIYGKTKVSAESFTAGDKPYQRYPYIMKQRGDRFFTEGINNTLLHLFIQQPSEDKVPGINANFGNEFNRHNTWFSYIDLFTGYLKRTNFMLQQGKYVADVAYFIGEDAPKMTGITDPALPAGYSFDYINAEVIQTRMKVKDGRMVLPDGMSYKLLVLPKLKTMRPELLAKIKELVAQGANILGPAPERSPSLANFPEADAKVKRMVTELWGNVNGTTIKTRKLGKGTIMSGMDMKLALNALNILPDFKTNTTDPVLFIHRSGPQAELYFISNQSEKQITFSPTFRSVDMQPELWDPVTGKTRVLSELSANGSSTTIPLTLEPLQSIFVVFRNPLVASPIRAINFPEAKTIEEINGPWKVTFNSQMRGPEKPVMFDTLIDWTKRPEESIKYYAGTAVYSNSFRATKPVKGERIYLYFSEVSVMAKVKVNGTDVGGMWTAPWRVDITDAIISGVNTLDISVVNNWVNRLVGDSKLPEAKRKTWTNNNPYTPDSKLVPSGLTGKVVVKTIKY

SEQ ID NO: 1009 - protein, 961 aa, Dyadobacter fermentans
MFKILRPIGFLAALLLLTGEMVMGQKSTQIISPSVFQNPPSTYGIRCWWWWLNGNVDKEVITRDLEEMKAKGFSGACLFDAGGAEQRGNAQVPAGPMFGSPQWRELYIHAMREADRLGLVMSMSIQSGWNLGGPDITAEESAKQVAFSQVQVKGNTRISQELPMPKTHHDFYRDIVVLAIPTKVFANRPPIRDFENKAATREVGASVPETRPLLTDIPGTPGEEDASKKQVLNITRHFKNGKLEWRAPAGEWTVLRFGYTATDAEVSTSSGDWQGLVIDYMSEKAFNRYWDTNVEPLLKAIGPLAGKTLRYLQTDSFEAGGMNWTDGFEKEFIKHRGYDPIPYLPVLAGKIIDSREVSNRFLSDLRKTLADLIAEKHYGVFSKRSAAYGIGIQPESAGPHAGPFDGLKNYGYSEIMMSEFWSPSPHRPRPIDRFFVKQAGSAAKIHNKKLVGAESFTTIGPHWNDVMWSDMKPSVDHEFSAGLNLVYLHTFTASPKAMGIPGQEYFAGTHFNPNVTWWNQSTAFIQYLTRCQYLLQSGTSVADVLYYYGDHSPNLGRLKEDDPAKALPGFDYDLINEDRLMELQAKDGKIFLPHGVSYRVLVLPDHKTLSLKALQKVEALVKEGASVIGSKTVTTASLVKYPASEQTVRQIADGLWGTGNEATGSRNVGKGTIAWGITAADFLRSKGVHFDMEITARETGSRYDYIHREDTGADFYFISSQNRAASKMTAAFRMTGKQPELWNPVTGETRPATSFYQKDGKTYIPLEFDPYGSVFVVFRDDIAKDQNGSAASNFVHLETATTLHGSWDVAFDPAWGGPAAVVFNELVSWPDRNEEGIKYYSGKAVYSKKFDASQDVAESKQVFLDLGEVKDIGIAKVTLNGKDLGILWAPPLRVPVGGVLKEKDNVLQIEVVNTWRNRLIGDRTKPVEKRFTKTNVKVLETWQLTPSGLLGPVRLLTGSEQ

SEQ ID NO: 1010 - protein, 799 aa, Paenibacillus mucilaginosus
MEENRLWNARWIWHQSYPWTSDPGTHEMVWFRREFDVTDPHLAQLVVDISADSRYRLFLNGDSVSVGPCKGDRSTHYYETVDLSERLIAGTNVLAAQVLHFAPSGPHLLGVSGPLSIHRAVSGAMFLEGVLIEGNGHSQTLHSDEKWLCKKMPGFKLVPSPIIFFLGGFEDTDGSGLDHGWELPGYDDEGWTNAVIVCETGDKFGQLTPWQLAPRPIPPMREEPASFRGITKADDRAAIPGYEAMLRGGDTRSVRVEAGQSIWLELDAGELVTGYVTLKLRGGRESRIKLLYAESYEEPASNLHHRVKGIRDDAENGILLGEADHYTVAGVGIGESVERYEPFDFRTFRYLRLEAAAKDEPLEIVLLSYRDTGYPLNAQAAFSCSDPDYAALWELSLKTLRRCMHETYEDCPYYEQLQYTMDTRLQMMFTYAVSADDRLARRALFDYHSSALPSGMLQSRYPSEYRQVIPSFSLYWIHMLYEHYWHFGDRELIRRYVPTMTGVLGWFRRMLTPEGLVAPTPRAYWPYFDWCIDWENGTPPAHAKGPLTLLSQMLAAALQTASQIYEAVGWSDAAREAKADANAVNEALLRLCWRPERGLFADGPEVEEFSQHAQVWGVVCGAVQGEDAVRLLERTIEPQAEHMAQLSVPASYELFRMLSRHGLYGKASNVIDRWKAFLHLHLTTLPEVTDDNHPRSDCHAWSALPLSEFTGEILGVRPGAPGYSEIIVSPQPLQLSWAKGSAATRHGSVEVEWTLDEEAVFRMSGNGPVGIPLLVVLPNGKQVEFRHGGKFEASAKLRA

SEQ ID NO: 1011 - protein, 844 aa, Unknown
  Paenibacillus sp.
MQSNTAVLLKGGDAVYMKVKGDTDNMAAKDWGDWSARWIWLQEEQGNADKDARHERVYFRRVFELPAGTGKAYSLNMAITGDSRYRLFVNGQRQWAGPCKGHEHVQYYEEFNLEGILQPGINVIAVTVVHYAGTAPFEMGEDGPLSVWRSEQGGLLVEAEITADGQLVQELPTDTSWKAIRDLSYRLRPFPMMRWMGGLEEAAGDTALRDWTLPEYDDSAWSAARIVQPVRDDYGQLTPWQLERRPVPLLYEQEQCFWKLMRSSCGEGKALFTAGHRLELRDGASSTVPSIAGPAAEGVLVQAGQQLWLELDAGELTTGYLQLKLQGGGGSLITLQYAECYEEETGDEEVRRKAVRDEMREQVLRGGYDSYRPAGYGTEDQPEVYEPFWFRTFRYVRLEVHAGHEPLRITGINYRETGYPLQLQGSFHCSDERYNRLWELSVRTLSRCMHETYEDTPYYEQLQYTMDTRLMMEFTYLLSGDDRLARRAMEDYRASQLPNGMLQSRYPSVLPQVIPSFSLYWIGMIHDHYRVFRDLTLVKHYRTAMLSVLDWFDQRLTPEGLVDRTPRQYWNYYDWVEEWPLGAPDCTNEAPATLMSLMYAFALGQAAELLEASGWTQIAAELRQRKAAVNAAVLDNCRQADGPLFRDSPEAGPEVQLSQHTQVWAVLAGTVSAAEGEALLQTVLTDTSMAKLSLPMSYYLFRALELSGMYDRSYGLWTRWMKQLELGLTTLPEIDSADTRSDCHAWSALPITEFTRGILGVRQDIDGIILQPHCGDLQYASGAVSTEQGLITVSWEITTEEGVEVFRLEAVWTPGSAITVILPNGEVQKSDTGRIEIDIRGFNC

SEQ ID NO: 1012 - protein, 1105 aa, Bacteroides thetaiotaomicron
MKSRLKQQIFAISLLACTAISPANALQTHLLREQFQNPSDEAKPWTFWYWMFGAVSKEGITADLEAMKRAGLGGTYLMPIKGIKEGPQYNGKAQQLTPEWWEMVRFSMEEADRLGLKLGMHICDGFALAGGPWMTPKESMQKIVWSDTIVDGGKIKGLHLPQPEAYEGFYEDISLFALPVKEEAADVMPAQITCANIATGNHIDIKKTVNMDDAGVIRSSYPCYIQYEYEQPFTCRNIEIILSGNNYQAHRLKVMASDDGVNYRLVKQLVPARQGWQNTDENSTHAIPATTARYFRFYWTPEGSEPGSEDMDAAKWKPNLKIKELRLHREARLDQWEGKAGLVWRVASSTKKEEIGEQDCYALSQIINLTDPFKNSPSDNFKERTLTATLPKGKWKLLRMGHTATGHTNATAGGGKGLECDKFNPKAVRKQFDNWFAQAFVKTNPDVARRVLKYMHVDSWECGSQNWSDTFAAEFRKRRGYDLMPYLPLLAGIPMESAERSEKILRDVRTTIGELVVDVFYQVLADCAKEYDCQFSAECVAPTMVSDGLLHYQKVDLPMGEFWLNSPTHDKPNDMLDAISGAHIYGKNIIQAEGFTEVRGTWNEHPGILKALLDRNYALGINRLFFHVYVHNPWLDRKPGMTLDGIGLFFQRDQTWWNKGAKAFCEYITRCQSLLQYGHPVADIAVFTGEEMPRRSILPERLVPSLPGIFGAERVESERIRLANEGQPLRVRPVGVTHSANMSDPEKWVNPLRGYAYDSFNKDALLRLAKAENGRMTLPGGASYKVLVLPLPRPMNPDPAALSPEVKQKINELKEAGILIPSLPYKEDDFSSYGLERDLIVPENIAWTHRQGEQGDIYFIANQLEETRTFTASMRIDGRKPECWNPVTGEINADIPYEQKSHRTEITLTLAPNESVFIVYPAEEDDKETSEKERKEKKDSVKEASETGLEATEYTVTFTANGKTIQRQELFDWSKEEDEQIRYYSGTAVYKTTFRWKSKVKEDQQVYLNLGKVCDLATVRVNGIDCGTIWTAPYRADITAALKKGVNELEIEVTNTWANALKGADEGKAPFDGIWTNAKYRRAENTLLPAGLLGPLNFDVANKNK

SEQ ID NO: 1013 - protein, 952 aa, Chloroflexus aurantiacus
MSYEQLSTSQSQVSRLIVRVEHYQSTLGIGNPCPRLSWIIETNATNWLQTAYEIECYTKDGRVRGRTGWIHSPESVLVPWPFEPLTSREQVLVRVRVRDNKGDISPWSEMLPIEAGLLKVGDWSARFITPDWDDDILKPQPCPMLRHEFRVDNDVIQARLYITSLGVYEAQINGVVVGDQVLAPGWTVYDRRLRYQTFDVTMHLREGINAIGVILGDGWFRGRLGFGGGRRNIYGNRLAVLAQLEITYRDGSTQQVCTDQTWRSTTGPILASDIYDGEIYDARLELPNWSKPGFADHQWSGVRLLEWDFSTLVAPISPPIRRIEMVLPVAIFSSPSGRTIVDFGQNLVGRVRLTVSGPPGQMITVRHAEVLEGGELSTRPLRFAAATDRYILRGDGTEVWEPRFTFHGFRYAEIDGWPGELRTTDIVAVVIHSDMERIGWFTCSDQLLNRFHENVVWSMRGNFLDVPTDCPQRDERLGWTGDIQVFAPTAVFLYDVAGLLQSWLIDLAIEQEKLGGAVPHVVPNVLGPSAAGAAAWGDAATVVPWVLFQRYGDKRVLETQYKSMRSWVDYIATKAGHTYLWDRGFQFGDWLDPTAPPDKPGQARTDKAIVASAYFIFSATLVAKAAHVLGYDADADFYADLAHKARFAFAKEYITPAGRLMCDTETAYALALVFDLFPTDTQRRYAGERLAALVRDSGYHIRTGFVGTPLICDALCSVGHCRVAYRLLMQRECPSWLYPVTMGATTIWERWDSMLPDGSINPGEMTSFNHYALGAVADWMHRTIGGLIPVEPGYRRIEFRPQPGGEIVYARVSHRTPYGLAECFWRIEEGVFYLRVVVPPNTTAQVFLPGRDDQPLDVGSGIWQWSIPCQDTATRGSYTVDDLVDEIIDDEVAREAVNQVLSQVDAWRLFGNLLLNERSASLREAIQALPNSEIVIERLNALLTRIPKKDGI

SEQ ID NO: 1014 - protein, 874 aa, Thermoclostridium stercorarium
MMRVYNLKTNRIKNPMGFVINKPKLSWLVESDTAKHQVAAQVEISADINFENIIFDSGKRTDIDSISYSPQVELKPRTRYYWRVRVWGDDGSEAVSEAAWFETSKMDEPWKAKWITPDFDPSVHPVVFTDFSIERDVADARAYVCGLGLYEMSVNGEKTGDEYLAPGLVAYDKWIPYQTYDITSQLKKGINTAEFLLGNGWYKGRYGLNRKQPFRYGNEFALICEIHITYQDGTADVIYTDTSWKARKSKVIDSGIYDGEIYDDTFCDDAVYPVRIADLDVNKLEPRRSPGIKIKERIKPAEIIRTPEGETVIDMGQNMVGWLEFTNRAPKGAEIMLQFGEVLQDGNFYRDNLRTAKCEFHYISDGKVKKVRPHFTFYGFRYVKLTKWEGEVNPEDFTGLVLYSDLERTGNITTDNSLVNRLFLNALWSQKGNFLDVPTDCPQRDERMGWTGDAQVFSGAAAFNMDVFAFFGKYLYDLKQEQKARGGNVPVVVPAHDVKQNGACGWGDAAVIIPWNMYLHYGDVSILEQQYKSMKGWVDYIKSKDDAAGGRRLWLNDFHYGDCVSLDVEDPFNRFGGTEHAYLASAFYSYSAGIVSKAAKILNKKEDAEYYRKLSEEVKNAIRKEYFTPTGRLAVNTQTAYVIALYMDLVPDEWKERVAFELRKKLKETKYHLRTGFLGTPYLCRVLSEYGSNDIAYRLLTNTDYPGWLYPVTMGATTIWERWNSMLPDGKVSDTGMNSFNHYSYGSIVEWIYRNAAGIQPVEDAPGFRRFRLKPQPHYLLKSLDAEFLSPAEKIISRWNINENGSVSFYFRIPFNTTAELVLPDTEVQDWKEFMSLNVVNILILTCLKDLTRKCTEQILQCGKFMKMRGQKKL

SEQ ID NO: 1015 - protein, 867 aa, Bifidobacterium moukalabense
MITIIGLGVEHSERGCVTDNPHPRFSYAVRSDRSDVVVDGARLAVGDWTCEAGDQTAVAYDGKPLEPFTEYHVTLDVSTADGEHAHAETTFETGRLGQGWQGRWISDAGYDFVEKKVSPVPMMFRKPFTCDPTKSVRKARLYATAMGVYDFACDGKRIGDRYFAPGFTSYKTNLQYQTYDVTDMVGAGAVHTLLATVAGGWAVGSFVFTRKNRVSADRQALLAELRIEYTDGSVEVIGTDASWEVSESGPVRMADLYDGETYDAMMDPGADGSRCKDWRHASLENPRSRPRHIEADYGAGVVAHETLSPVSVARRAGGELVYDFGQNLAGVVRMRIANGRAGQTVVVRHAEILNPDGSLNTAFLRTAKATATYRCADADGFPEGVQEYGPRFTYMGFRYVSVRGVAEDDLRIEAVVLHSDLRPIGDFACSDERLNQLQHNIVWGAKSNLMDIPTDCPQRDERMGWTGDIAVFAPTACLNFDMSRFLEKWLRDVKAEQLKTGGIPNTVPVQGYGFPATMPEMAIDWWGDACVLVPWAVYRSSGDATVLHDMYDTMKRYVKACRFWAGLIGFGKSRYIWNTPSMLHFGDWVAPDVPKMSQWQKRAKWTATASLNNTSRTLARVAEVLGYDEDARAYDELADKVADAYCSVLTDGNGRLDNEFQTGYVLPLYLNMFPETVRGNAVDHLVKLIEDNDYCIGTGFPGTPYILFALADNGREDVAYRMLLNTACPSWLYEVGMGATTIWERWDGLDENGECPIGDDGTDLMISYNHYASGAVGAFLYQRVAGIEAIGAAYRSFRVRPVLGGGLTWAKAHVDTPYGRVGSAWSLDGGRFSITVEVPVGTTCELALPDGTTMQLSNGVHTATCEM

SEQ ID NO: 1016 - protein, 890 aa, Olsenella profusa
MRATNLTVACLTNPLGIDVRCPELAWIDEDGLSQSAYQVECKDGAGATLWDTGKVASASMRIAWPGAALASRERVTWRVRLWDDGDACGPWSEFASIEEGLLSADDWCARWISGNYDVPTPRAGALGNFRQMVAAMRPASPDQVVTEPILEGRYPVDCFCRAFVVGKAPVRARLYITACGLYEARIDGEKVGDLCMAPGHTDYRKRVQYQTYDVTAALATGAHELTVQLADGWYRGSCGAWGLLNQYGTQTKLLAQLEVTYADGHVDCVATDTDWQWSGDGPILFADNKDGEMVDATRAPSYAGHARDARHDVAPTASNNVPITMHERFSPAPALAPNGRLLFDLGQNIAGWVELDFDAHESQHVLLRCGEMLDADGNLTLKNIQCSREGFATPLQQVEYVCREGHNHYRTTFCVFGFRYVEVETNVQLGEGSLTAIALYSDMRQTGSFECSNELLNRFFESTVWSTKGNSLDVPTDCPTRERHGWSGDAQIFFETLSYLFDCRSFERKWLHDLFDWQKRDGRLPQVAPAGGVDSYMRFLDGSVGWADAGILIPYRYWRHYGDASVLAELYDGMRRYAEFMIRRCGRRGPFSKRVGIHGEAKKYLVNMGQCYGEWAEPADVHKMDWKDTVAPHPEVATAYTDYVLGCMAQIARELGHEEDEARYRQYSEGCRLAYQELSRLPEFSLDTDRQARLVRPLAFGLLDPQQTAYARKRLVKACESYGWRLGTGFLSTPLILDVLAKYDLDAAYRLLENEEMPGWLFMPKMGATTVWESWEGTQAQGGIASLNHYSKGAVCAWLFRVMCGIAPDGERHVTVAPRPGGRFAYAKAGYESPCGFVGCGWQRVEDGWRFAVEVPANCAATVVLPDGSTREVGAGVHEFECVARAAREG

SEQ ID NO: 1017 - protein, 930 aa, Kribbella flavida
MSFPAAPARLRFEHRTDPGPVLGIGTATPRLSWQVPTAPDDYRQAGYEVEIARGDAAPEQYTVDSADQVLVPWPGTPLAARESATVRVRVRGDGDWSQWSDPATVEAGLLSADDWTARFVSPRENAGHEAPAPLIGGVIDLPADIAQARLYATAHGIYEPTLNGTRVGDEQLAPGWTAYEQRLRYQTYDVTDLVAPGENRLELLVGNGWYRGRLGFHGKHSLYGDRLAVLAQLEVTTATGEVKVLASDGTWTTRETNVLADDLYDGQHVDLRRTLGEPGPVDVLDADLSLLVAPDGPPVRVTDVLPAKAVTTSPAGKTLVDFGQNVVGRLRLRVRGGAAGDEIVLRHAEVLEDGELGVRPLRTAKATDSFVLAGPDEVTLEPTLTFHGFRYAEITGVPDLRAEDVEAVVVGSDLRRTGWFESSHPLLDRFHENVVWGMRGNFLDVPTDCPQRDERLGWTGDIQVFSPTASFLFDTAGFLTNWLADLIAEQHKDGSVPFVVPDVLRQPGPATAAWGDAATIVPWVLYERTGDAGLLARQLPSMRAWVDRMAGLAGDDLLWVGGFQFGDWLDPTAPPDDPFRAKADPDVLATAHLARSAEVVALAAEVVGAGELAREYAELAARVRQAFAAEYTTGSGRVLSDAATNYALALQWALLPTEAQRKRAGERLADLVRTAGFRISTGFVGTPLMADALADSGHPDLAYRLLLETGCPSWLYAVTMDATTVWERWDSMLPDGSINPGQMTSFNHYALGAVADWMHRRVAGLAPGDPGYRRIVVDPLFTAHLTKASARHLTPYGEAAVAWSRSGGRVRLEVTVPVGARARVAVPGESAPVEVGHGTHEWTADDVYGETPPLPADATIRQLIDHEPSWTTLAAAATRTGIVADDAELAGRLERYLDHPATELVDAVSPRGFSPSAEALQAELDSVLGR

SEQ ID NO: 1018 - protein, 1027 aa, Caulobacter vibrioides
MFELDRRALLLGLPVTSGALADGASQTSRWRAVGLRTAMRRQPLGIDDPQPMLSWRLEGPAGAVQSAYQIMVASTAEKLHAGVADLWDSGRVKSSESVGVRYGGAPLKPRQRCVWRVRAWDAAGRASDWSPPATWEMGLIDQSEWIGDWLAVEAADERDDRVAGVRWVETQTPKPHETCRFRLSFRSGGGEGRLAIMAEGKLSKLVLDGRSIELPWRDPNGYGDPPALGLPLQLEAGAHELIAEVTSTGPGEGPGRAALGAQVRVLAADGAARRIVDGWETEAAGAWTPAVVRTAQPHFPWPPTPARLLRRTFTLSKPPTQARLYVSALGGYRIWLNGRRVGDDELQTEPAAYRRHVPYRAYDVTDLLRDGENVVGLIVGDGTFASYQAPDGRYAYGPGPRRVRLFLESRDSGDRVERVATDGEWRHALSPVLMSEIYAGEDHDLRLWPRGWAEPGFDDSGWSRVWTAPPPEGAPCALLSEPIRETRVLKAASIRAVGPGRHIVDFGQNFAGRVRLRVKGAKGAPVIVRHAEILDGQGALDRRNLRVARAEDRYILNGDDAPETLQPSFTYQGFRYAEIEGVAGLDRDMIDGVVLSSDLPEIGVFRTAEPLVQNLWLNSLWSQRSNFMGIPTDCPQRDERLGWTGDAQVFWETAAFNMDVGGFTRGFARTLRDDQAPNGAYPMWSPSPRGLGWGTTTPTPGWADGGVMLPYVAYLHSGDRSIVDENWTAMSAYVSGVLAENPDGLWRRGRGADFGDWLALDGKWPGDETTPKDLIATAMLARSVDQLAQMAAWTGRSAEAKTWRGQADRIKAAFASAFVRADGTVGNGSHTGYILALRLGLAPQPLRKAAGEHLAADIRRRGTLLSTGFLGTPLALDALADHGHAGLAFDLLLRTEYPSWGYMVRRGATTTWERWNGDTGDVSMNSFNHYALGAICGFLYRRVAGVEPITPGFGAFRVAPLIDPRLRSAGATVDSVRGRIETDWRVTGDKAVLKVRVPANSRAEVVLPTLTRSLGAGDHTLSVPLAK

SEQ ID NO: 1019 - protein, 924 aa, Bacteroides thetaiotaomicron
MNKKQLILLCMLAAGGSIQAQQWPDAPAEARPGTRWWWLGSAVDEKNLTYNLEEYARAGMGAVEITPIYGVQGNDANDIQFLSPRWMEVLKHTQAEGKRTGIEIDMNTGTGWPFGGPEVSIEDAASKAIFQTYDIEGGQEIVQDINVTDKKQQPYSVLSRVMAYDENGRCINLTSHVRKDKLVWKAPAGKWKVIALYNSKTRQKVKRAAPGGEGYVMNHLSKTAVKNYLSRFNRAFKSSKTSYPHTFFNDSYEVYQADWTEDFLDQFARRRGYKLEEHFPEFLDENRPEISRRIVSDYRETISDLLLENFTRQWTDWAHKNGSITRNQAHGSPANLIDVYAAVDIPECEGFGLSQFHIKGLRQDSLTKKNDSDLSMLKYASSAAHIAGKPYTSTETFTWLTEHFRTSLSQCKPDMDLMFVSGINHMFFHGTPYSPKEAEWPGWLFYASINMNPTNSIWHDAPSFFDYITRCQSFLQMGKPDNDFLIYLPVYDMWDEQPGRLLLFSIHHMAKLAPKFIDAIHRINNSGYDGDYISDNFIRSTRFKDGQLITSGGTGYKALVVPAAHLMPNDVLAHLLKLAQQGATIVFLENYPTDVPGYGQLEQKRKTYQQTLQKLPSVSFSETTVTPVGKGKIITGTDYARTLASCNIPQEEMKTKFGLQAIRRVNDSGHHYFISSLQDKGVNDWVTLGTKAKAAALFNPMTGECGEAKVRQAGEQTQVYLQLKSGESVILQTYQQPLQAARPWKYIQEQPFSLSLDHGWKLHFAESEPKIKGTFDIDRPCSWTGIDHPAAKINMGSGVYSLDIELPALQADDWVLDLGDVRESARVRINGQEAGCAWAVPYQLRVGHLLKSGKNHIEIEVTNLPANRISELDRQGVQWRKFKEINIVDLNYRPANYGHWAPMPSGLNSEVRLIPVDYLSFKTH

SEQ ID NO: 1020 - protein, 803 aa, Rhodonellum psychrophilum
MKSLSKILTTVTLLLAVFACEKKPAEIVLFSMMDGVEGLSGKTEYLASPYVTAGDRVYMVGHQDGSFPDLGWHVEGEMGGIWNHPIKLMDGFTNAIEIEGNRFCLDNASAFINYPFANKHEFKNSVPGLEVERFQFVPDGKQGLVIEYLFKNVDKSKKSFVFEFDGHTDLMPVWLGDRAGMIDHVDNLVFDDQRQAWRGKDEGNEWYVLFGANQTASHSQGDSSLCNYFPQGKGKSAKLSYEMELSANGEGSLKFFIAGSYSGLDDVQKTFDLIKTHPETFLKDKRTNYDRIASLSKITIPDKELEKTFEWVKYNTEWLVRDIPEVGRGLGAGMPDYPWWFGVDNEYTLKGAIATGRKDLVYATVDLIHKLSVQENDNGKIVHEVSTNGVVFNPGNINETPQFASLIWYVYQWTGDKAFLEKYYPTIKKGLVWLMEENDKDGNLFPDGYGMMEIHGLESEMIDVAVYTQKAFADAAQMALLMAEPEVARSYQQTADLMKAKINTDFWVESANSYADFIGTAAETFPLVDAAIIRADTLGKPWAVEELKLLRKKLSTYPRNKKQGFVLFHNWVVNTPMEMGIADPEKAIKALDKGSKFVNPFGVFVTGIDRDEASQSEDGSFTGSKVFSYTGAVMTLPTGVQAISENNYGRPDQALAYLQMMVKSFGFALPGSIYEVSPDYGMMAQAWNLYSFGVPIVTQFFGIQPDAGNKVIHISTQMPSDWDSAKIEKVLIGDNVLTLSFLRVEGEIQLQINQTKGDWQIDFVFPTGKYNVWKVGGKEVEKTRVGNQEVFRTSGTSISASFK

SEQ ID NO: 1021 - protein, 883 aa, Unknown
  Paenibacillus sp.
MLQPYAPAIKNYYSAIGIDTPKPIFVWKLSSPLRNQKQTHYRITVAENAESLEEENNLLWDSGKVASDEQLGVMYKGSPLESTSRYCWRVAIWDSSGQSLWSEVQYFITGYLNSEHWSAKWIGDGSDAPFYARYEFDLNKKVKQAFALVSGLGQFKFYMNGRQVGDHEMDPGWTNYHKSVQYVGFDITDHLQSGKNAVGLHVGNGFFAGASGGRHFYTMDKGYEPYGDQLVAIGEWHIEFEDGSRIILRTGEEGWKVHESATTLANVYGSENFDARLYPDGYHVPGFDDSGWKPAQLLKPPAGNLVQQNQPPVKVKQVYDTLSVAEPLPGVYVFDLGQNMAGMFEIYASGPAGSKVIIKPGELMREDGTIATPWDIVTYSEFILAGTGEVEVWKPDFSYYGARWVQIEGCTRDEADTGRPMIHDVKGHFITSASQDTGTLSTDDVRIDKLADIITKAIESNLQSVHTDCPTIEKLGWLEASALMGPSIVYVKQAEELFLKIVRDMMEAQTEEGLIPDIAPEYSLFPDGFRDSIAWGIALLMVPDLLLERYNNFTAIEVAYPAMKRYMDYLKSKEIHDGLIGHGLGDWGIQPQTGGDYIENVETAFYYEGYRLMAKFAGILGFTDELEDYSAEAERIKLNYNKQLLHSLPENSPRYAYCKLGGQFDPANQVVQAIPLAFNLVPEEQLHNVEHALLQAVASRQFHSGEIGLRYLFLALSRLNRNDIVLDMMMQPEHPSYIRFVERGETSLPEFWTDEARSRNHDMMGHILEWLYKELLGISSASGAYKEILIAPFRSGRVKRVKGVHHSIRGEIGVEFSHSAEEIILNVQIPANTTATLQIPLLHGESQLYERGTRVLYEPFNQGAQIYARLKIGSGSYSYVNRV

SEQ ID NO: 1022 - protein, 986 aa, Catenovulum agarivorans
MRKSRSLGLGLVKYILIVVALVGCIQTSPTMDESAINHQAQTIYLRGGFNGWSTATAFDRTEQAGIYVAKTKITMGNHGFKLAPADWSFAWVVSAHENQLVELNKSYRLNTAGGEEDSLFIETRGLYQFTLDITQANQPKLLVKLLSADSAKTPPPHYGEMTSLEFNRFNGEKVEAVFSAKATNNGLREYVHSTTQSLRDPVPSYSRYQEDIAHPRVRSGNIAFDALFALAVDEMKLNSVEQIKDGNYNNGQAIDCSCFETGEKWNYVWTRDLSYAAHLSLAQFDAQRVENSLLFKVSNLRASAPISPFLAGNAPYTQIIQDTGSGGSWPVSTDRMTWAFGATALLANLAEPQRSQFARKAFTALVNTIENDRLVAFDSHLGLYLGEQSFLDWREQSYASWIVDDLSSMSTAISLSTNAGHYQALVLAADLAGQLGDVPAAKKYKGWASALKNAINQHLWLEEKGLYSSLTSGHYHKVALEKFDWLGQSLAIVTGIASDEQARAILSSYPHGPMGAAVIFPQQPNIPVYHNRAIWPFVTAYGLNAAVKGKNVAVTQAALDTLTRAAALNLSNMENLEWLSSEPILLDKTHPQLSGPVINSKRQLWSVAAYLNLVSNTIFGAQPSQQGIEFRPFIPKSFKDQWFKHSQVINLINYQWRGKQFDLQLKFAPSNKKFGAYVVNRVKVNGLAHSGVLVEQALKQHNLIEIELVLDNTVDNNINLVDSEPLAFDPLVYAPLEPKLSVVAKANDYVIQIEDKGNANLTSAAIEYEIYRDGNLLTRVPAGAGVSQWLDKGQAQQAHCYAVAARFVKSQNQSHLSEVVCMGERMQIPVADQRIQSNKPKKILGEQLIFSQWGEADDTLQVHFSIDQPGKYAIQFNYHNPANAINLGISNGVKWLEVVNSSNQQSVKQAAVQFPHTRVDKTQFGDNLSTPVEIELAAGDYKLHLHDFYNMSYLQSNKTYTAAGGMKGISNKFDIYAVTFVLLPLK

SEQ ID NO: 1023 - protein, 799 aa, Zobellia galactanivorans
MNLFLSIFLFCSPLFLLGQSELNYPELLYPPQAIKANWVSHPDIQGGEDRIVLFRNEWMVDDPSEAFIINISADNHYFLYVNGNLVTHGPQLSDIRHWKYETIDLKTYLKTGKNLIAIKVVNYGKRRFYGMQSIFTSLMVNGATENAKVLNTSGTDDGWKCSIDDSYRALEVNWRGGGPKSIVGGFYANNPTDFVDKNHYPTDWEQPDFDDSDWVDTQFFEGASSMGGSMAYLLEPRNLPLLTWEKEGIGHTVRTSDIDVSEFPVSGKTVVPEHKKIRFLIDQKYVTNGFPELIFSKGKNAHIKIKYAENLFGPKNTKGDRNIIKGKELLGYYDHVVSNGKERQKFTPNWMRTFRFVEFEIETKGQELVLDSFSNYRSRTHIPSIARFSSNNETYNAIFDICKRTVDICTQDYFLSDAYYETMQYVGDTKIHALLWQAMSGNLAHTKNAIEQFHRSRDADGNILGAYPLRSTFIYPTYSLVWVDMVYDYYQLTNDTDFINTYKDGIIHTLAGFEKNMNELNLVNETQYRYFVDWYTGPNNGGGTATKNNGKNSAVVSLHYVHALQNAARLFKAIGDKHTADTYLDRATAIKSSVYKLCFDPNKNIFAERPDKTVYDQHTNIMAVLTDAIAESEQKALLSNILNDPKLLQATYYYRYYLFEAIKKVGAPELFDLAQRPWQAMIDNHMTTTLERFESDKKPTRSEVHPWSASPAYFYFNYLAGIKSVKNDFQEIEIAPVFGILEDMEGLLPTSKGNILFHLKKIRSKLSAEIIVPKEMSGELVWNEKHIPLKHGQHTYILK

SEQ ID NO: 1024 - protein, 431 aa, Bacteroides thetaiotaomicron
MKRTLLLTFLLLSVSALCFSQKLVEVAKGYSCTSVNTTIFRNNSLVTHGDEQYISYYDADGYLVLGKRKLNSKQWTLHRTQYRGNVKDAHNIISIMVDGEGYLHVSFDHHGHKLNYCRSIAPGSLELGDKMPMTGVDEGNVTYPEFYPLTDGDLLFVYRSGSSGRGNLVMNRYSLKDHKWARVQDVLIDGEDKRNAYWQLYVDEKGTIHLSWVWRETWQVETNHDLCYARSFDNGVTWYKSDGEQYKLPITASNAEYACRIPQNSELINQTSMSADAGGNPYIATYWRSSDSEVPQYRIVWNDGKTWHNRQVTDRKTPFTLKGGGTKMIPVARPRIVVEDGEIFYIFRDEERGSRVSMAHTADVANGKWIVTDLTDFSVDAWEPSHDTELWKKQRKLNLFVQHTCQGDGERTAEIEPQMIYVLEANTNTKK

SEQ ID NO: 1025 - protein, 787 aa, Bacteroides xylanisolvens
MKKDYMKYQQNSKREEKSKFITNQLTNMAHISIRSYLYLLGTTLFSCAPQELKTPFELKCENIPVPVGVDTQTPRLSWKLPLLEEDSINRVEIWLSTDSTQLSGRQSGYWNKSIIGAPIRVSYDGQPLDSYTTYYWKIGYQTSSKQKTTFSPISSFTTGCLSPDNWKGKWITDKHDITYRPAPYYRKSFQLDKTIEQALLTIASAGLHELSVNGQRAGNHFLDPMYTHFDKRILSVTHDVTSLLSLGENVIGVQLGNGWYNHQSTAVWFFDKASWRNRPKFTAQLHLRYTDGTTEYLGTDSTWQTTDSPVIFNSIYTAEHYDAQKELAGWDSPGFNATGWYHAQETESPTETIKSQVMHPIRETARYTATQCKKINDSCYVYHFPKNIAGVTELKVKGKKGTKLRLKHGELLDKNGMVNMANIDYHYRPTDDSDPFQTDIVILSGKQDRFMPKFNYKGFQFVEVSSSAPIQLSDENLIAVEMHSDIPAIGYWSSSSDLLNKIWKATNSSYLANLFGYPTDCPQREKNGWTGDAHITIETGLYNFDGISIYEKWMNDFCDEQKDNGILPCIIPTSVWGYDWANGVDWTSAVAIIPWEIYRFYGDTTLLRRMYGPIKKYVSYIESISTNHLTDWGLGDWVPVRSKSNITLTSSIYYYTDVCILAKAARLFGYAEDASYYNTLAQKIKEAINTSFLNKETGIYAEGTQTELAMPLYWGIVPEEDKKKVAARLHELVEKDDYHLDVGLLGSKALLSAMSDNGYAETAYKVASQDTYPSWGVLDQTRCYNST

SEQ ID NO: 1026 - protein, 910 aa, Pseudarthrobacter chlorophenolicus
MTAPARLRAEHLREAMGLAVREPRLSWTPPAATAGQTAYRIMADNGWDTGRIASAESGGIAYGGPALDSRSRFDWRVRTWNVDSDGTETASDWSESMPVELGLLHPSDWTGQWISPGEEAVSPPGERPGYALTRTFTLPAAPDKARAYATAHGIYELFINGQRVGDQQLTPGSTSYNTTLQVQAYDVTALLTAGLNTIRAVLTDGWYRGTFGYTRDADMYGTHTAFLAQLELESEAGRQVIGTDPSWLVSATEVISADLMAGQRVDFRAYDTGSAPSAGKAPGVRAAVVRPGSFGALTGPLAPPTRVTEELAPVSITRLRNGHQVVDFGQNIHGWVRLAALGGPGETVTLEYGEALGRDGDVTRDHLRPHDFRVPGAFLDAGQVDTVTASGAPGEVFEPRHTSHGFQFVSVRGLATDLRPRDVTACLVRTDLERIGTFHCSDERLNKLHGIVEWSFLGNSCEVPTDCPQREKAGWTGDWQLFVPTAAYLYDVTGFTRKWLRDVRADQWDNGVIANISPSPGPAITSAEFMGFTNGSSGWGDAIVMVPWEAYLATGDASILAENWDAMNRWLGFVRTTAETRRHAARATQAPVPADHEKYLWDTGFHFGEWMEPDGPGPDLFASRTADNGIVATAYYRHTTDLMARIARALGLAAEAADLARLSDAIRDAWATEYLDESGRVTVASQANCVRALAFQLAGTEHRAAVTTQLVELIRDAGTHLGTGFLATPYLLPVLADHGHLGLAYELLMQDSEPSWLAMVDRGATTVWELWNGLDAGGAPHQSLNHYSKGAVVSFLHRYTAGLRQAPGSAGWNRIIIEPRPGAGLTSAATSHQGPHGPITVAWTLSTDALGPDEMTADGVLTLTADIPSGTTAEILLPGQPAAVVGPGHHVFSAATGGDTAHPELMRSTL

SEQ ID NO: 1027 - protein, 921 aa, Dictyoglomus thermophilum
MKSSNIYSPFDLKCEFTTNPLGVDKKNPIFSWKLRHLEKNEKQTAYQVIVSSSLETINDNIGDVWDTGKVLSSEQVIKYEGKELEPCKVYFWKVRWWDSKDQESPFSVVNTFETGLMNEENWKAKWITKKEHKYEVYSPDGAPFGLNYTIAYAPMFRKSFSISKKIKRARVYIAGLGLYELYINGERIGDRVLDPGQTDYKKRVLYTVYDVSKNIRDGKNAIGVILGNGRYVKEYGYDFPKLIIQVLVEYEDDSIEWIVSDESWKTTYGPITLNSLYHGEIYDGRKEIKGWNLPDFDDSTWENAILAEPPGGKLYSEIYPPIRITKTIKPIKMWSPEPGTYVYDFGQNYTGWIKIKVRTNESGKEIRIRHAELTYEDGTLNYSTNRTALATDVYITKGEGYEEYEPRFTYHGFRYVEILGYPGVPTLEDIEGKVVHTAVESNGEFICSNELINKIHHNIIWGQLSNLMSIPTDCPQRDERMGWMGDAQLSAEEAIFNFDMIGFYRKYLNDIRDAQKENGSLSDVIPPYWSIYPGDPAWSTAYITIAWYLYQYYGDKYVLEEHYEGFKKYVEFLKKLAPDYIVSFYKYGDWCQPGTVRPKDNSGELTSTFYFYHDVITLSKIAKLLGKEADYKYYSELADKIKSAFNKKFLKEKAYASIPTELSEENVKALLEKYPEDIKDFLRQQFTILSSLGMFTSQTLNTLPLYLNLVPEDKVQDVLKTLLEDIIIRHDYHLDTGIVATRYIFDVLTSYGYDEVAYKIVNQKTYPSFGYMIEEGATTLWERWEKLTSTGMNSHNHIMFGSVDAWFYRVIAGVRVGEPGWNKIIFEPHPVGDLKYAKARLNTIKGEVEINWQKTENIFSMRISVPVNSEGEVHVPKLFERFVVKEGDNIIYEKKGDLEENEKYIVIRVGSGSYNFYMEKI

SEQ ID NO: 1028 - protein, 952 aa, Formosa agariphila
MKYNKLLFSLLLLAVFCFSCKEEQKLQTSLDFDKVLLNAKSNPIAIESESPLFSWIIKAEGFGKSQSAYHILVASSLDKLDETHADVWNSNKVESSKSTFVKYEGKELKAATRYYWKVKVWDKSNQESNWSEPQYFQMGLLDESNWGEAKWITLTNDTRTSEYRFREYKTGRMEQPIQVDGFAASYFRNKINLNKEVDNAQVYICGLGYYEFFLNGEKVGDHVLDPAPSNYDKQAYYVNYDITEQLNSGENALGIILGNGFYGQNISWKNDPESDRDLAYGPPTVRVLLKLKYKDGTESEFFSDETWKESTGPIVFNNIYGGDTYDARFELGDWTSTNYDDSSWGFAKETAPEIKNISAQQIPAIKKLQDYEPQNVFKGSDGEWIVDFGQNIAGWVKLNVSEKEGQLIEVITTEALLTNGRDIFPGSTGGGANGMAQIYQYICKGDGQESWEPKFSYHGFRYAKIKGVSTKPDADMIKAVLVATDIQETGSFECSDDLFNKMHNISKWTIVDNVHGIPEDCPHREKCGWLGDAHAFCEYALYNYDMYDFYKKYMEDIRTQMLPTKGHNNPELKFQVPTMIAPGKRTSSYAKIDWGVATMYLPWYNYLYYGDDAIVNEYYPEMKDLTNFYLNFKGENGIMQDGMGDWCPPRWDRRTNPEAMECDPIISANAYFYDVLGIMETFAKMNNDGAFQSEMKAEKEALKDAFNKAFLVEIPNTDFKWYQSQTATVQALQFGMVPEEEIENVVNGLEYDIVEVKGGHHSTGIHGNRYIYTVLSKYGKADLAYRILTTPDFPSQTYIMNSGFTTWPERQFEWETMEGPTNSLNHPMHSGFSAYFFESLGGIKSSTKEAGYKQFIVNPEFPSQITQTKVSVPTPYGDIKNDWSFEEGKLSMTLEIPFNTEANLVLNQAELESLIINGKTFQNLQKNTKSVTLQGSNVILGSGKYKILYNKR

SEQ ID NO: 1029 - protein, 902 aa, Rhodococcus jostii
MTTPTHLRLEHLRPGEPCGTTHPRLSWRLPTGSTGQQAYQVRVAGAFDRTSSTLFTTEIIEGRDHVLVRPWTATHPAPTAGEARTWQVRCWTDLGPSDWSEPATWVTGLLHGGDLTADWIEPYEPDVPPLGHRPVYRLRASWRPRAEIAHASLFATAHGIYEFFVNDVRVGDHELTPGFTSYRAHLQVQHFDVTDLLHPEHNDLGILLSDGWFRGRHGFERHGDSFGDRVAALAELHVRYADGTSERFGTGDGWTSTPSEIDAADLMDGQRVDLRRVPAGEVRHPAVVARGGLYDDRSRLTTGVAPPVRRIETLAAVAVTEPRPGTYVVDFGQNVNGWVTAADLGPAGTHATLTHGESLAADGSVDTDHLRAFEFATGTGLPAGQVDHVVSSGRAGEAFESRHTTHGFRYVQFDGLATKPGPGSVTAAVVHTDLEQVGSFGCDNDRLAKLHAAAVWSFRGNACDVPTDCPQRERSGFTGDWQVYVETAAFTHDVAGFSDKWLRDLAADQWPDGTVPNIVPNPAGNQPSGNHFADIANGSAGWGDAAVIVPWQLWRLYGDVEVLERQYDSMTRWVERAAGAARDRRHPDRARARPTPDAHEEYLWDTGFHWGEWLEPDEIPAPDPARDHSVVATAYLARSAELLAQIAGVLGRDRDECRYAAIAAGAVRAWQREFITPEGTLTHPTQANYVRALEFDLVPAEGRRRFADELAQLLVDNDYHLGTGFLATGMLLPALARNGHLDTAYRVLLSTGNPSWMEMIDRGATTIWERWDGVDENGRATASLNHYAKGAVISFLHQFVAGLRPAETTGPHTVGYRRFVVDPRPGGDINTAHAEHCSPYGNIAVRWTIADDVFTLSLTVPSGSECELRLGDTTELLRSGTYTRTCPAARVTQRSSRASPTR

SEQ ID NO: 1030 - protein, 920 aa, Lactobacillus crispatus
MKLVRIEVNHMETPIGFNLDNHLHLVGFLDGPVTSKLQRKLIIKAHDKEIVTFDWENADNLIFDFPINLTARTRYEVEMSVKNDREMSTATTYFETGQIDETLKGKWIGTEHKDLHSIILYKKFTTKDVKKARLYISGLGLFEAYLDGNKIGNEFLTPGFTDYNYDLQIESYDLTTELLKSGEHTLAIMLGDGWYRGKLGLKVHGGQPNNYGDQLMAIADLRINDDQQIIVTDKSWQVTTSPITHSGIYYGEDLDDNRQLNELANAIELTSPTKHLVDRQSLPIQRHEQFSVKEIIKTPSGATVLDFGQNMAGWLEFKNTIPKGEKVSIEFGEIMLDGEFYRDNLRSARAQFTYVSDGKEKWVRPHFTYFGFRYVKLNDFEGEIDPNNFRAVALYSNMIETGEIITNNSDVNRLFENVKWGQKSNFIDIPTDCPQRDERLGWTGDAAIFSKTASYNMDTYQFLKKYAYDIAVEQSKNNGFVPLYVPAVDTKDGGKAVWSDAATIIPWIAYKRTGDLAILRQNIGAMMSWVDWIHDRAVSHGQEYLWLGDDQLGDWLALDTEDIMKLKGKTPDDLIASAYYYYSAKLVSQSAETLNMKHEKQYYGQLAKLIKHAFINHFFTKDGLSIADTQTGLALCLSFKLYPANAKDNLINKLVEKVEVNQNHLNTGFVGTPLLLPALTDNGQQDLALRLFLNTDFPSWLFEVKNGATTIWERWNSVDSEGHIAQNGMNSLNHYSSGAVMEWAYEDLLGLKQNGNDAVFKPMLTAKLNQISGQIALPTGIVKVAWHIKSSKLIHLEMDIPYGSHLKLILPKHEQDIPTIFKSGHYELDVEVINPIVEAFDVHTPLAEYRNQTSLTKKLSELVPFWGFLAMPGNMDHFAKYSLLQLSREMRGIGFKPFTQEDIEKINQLFKEYHFKGAEK

SEQ ID NO: 1031 - protein, 796 aa, Pedobacter heparinus
MTNFSCIAKRITSFLMLFLSCSPFITAQVKSGTIVYPRGSFDADWISCPDVNLKSYGVFHMRKVFELTSRPKQFVVHVSGDQRYRLFANGTPVCFGPARGDLRNWNYETIDIAPYLKTGKNVLAVQLWNMGSGAPAAQLTYQTGFILQGNSNAEQMVNTNNSWRIIQNKGYFPEPFPPSRLASYIVGSCDSVVFKNYPFGWQNINYDDKSWLSPVSETKPRYYTEKRSLIPRSIPMMEEKIEPITGIVRILGTDTSAILNSFNKNGSITIPANTKATILFDRKTLTTAYPEITFSKGSNGKVKITYAESLFNSENLKGNRNEIKNKTIKGYYDVFLPDGGTAHTFRPLWTRTFRYIQFDITTGSEPMVIDKMQSVFTAYPFKEHAFFTSNDSTLHEIWDVSWRTARLCANETYMDCPYYEQLQYVGDTRIQALISLYVSGDDRLMRNAIEQFHQSQIPDGLTMDAYPAGGGKFIPPFSLFWIAMLHDFYWYRDDEKFIEKYLIPMEAILKWFEYRLDNNSGMLGKTGYWNFVDWSFSPKGIPSGGLEGNSSILSLQYVYALEQAAEIFAHAKQQQKADYYHNLGQKIKRAVYARCYDINNRLLADSPERKAFSQHANIWSIITDCIPFKDQEATMERIMNDSTLTATSLYYRFYYTKAMKKAGLGSLYLSSLRPWKQMLDLGFSTFPETLAPNVRSDCHAWSASPCYDFLATVCGIEPGTPGFATVRISPNLGNLKAVSGELPHPLGPIKVSYKKIKEGSYSAHIELPANLNGIFISKDQKVILTGGKQEITFKYE

SEQ ID NO: 1032 - protein, 757 aa, Spirosoma linguale
MRYIFFLGLLAASLTAFAQTAPTNLRTDLLLHTDKVWSNGFLTNYTLDGADSAKFAGQLALIRSSRPSFSWVLSTAGGTSRQTAYRLILSTSRQKNQADAGDVWDSGKVMSSQSVGILLPASQKLDTNRIYFWKVKVWNERNLESDFSQPKAFRTAPRLTAYETPFYPLVKTEEAPRSQRTLAGQRIVYDFGKDAFGQAFLTVSSASESDTLIVHLGEAVTADGHVNEKPSGTLRYRQIRVPLQKGTHRYAIQFKPDKRNTGPKAILMPDYIGEVLPFRYVELAFNPATRIEQIVRQVVTYPFDDSATTFSSSDSTLNQIWDLCKHTIKATTFTGYYVDGDRERIPYEADALLNQLSHYATDAEYNMAKRSLNYLVFHATWPTEWSLQNVLIAWYDYLYSGDSRTVEALYPELKAKLLLPLARPDGLISTRTGLQTPEFKKSIHYDTFDGRPTIQDIVDWPQQGVLGLGKKEAGETDGFVFTDYNAVVNAFHYQGLVFMAQLASRLGKTDDAAFYANRAGLVRKAFQATFIHPKTGLVRDGEGTDHASLHANMMALAFGLVPEKLQSQVLAHIRSRGMACSVYGSQFLLDALYNANESAYGLALMTSTDERSWYNMLRTGSTMTTEAWDTRYKPNQDWNHAWGSAPANIIVRKLMGVEALTLAYETVQIKPQPDTLRQASLQVATLRGPISVAFDNTPDRFVLRTTLPANTNGVVYLPRKKTKSQVLQNGKSVKAAVEGNFWKITSVGAGTHEWEVR

SEQ ID NO: 1033 - protein, 954 aa, Pedobacter heparinus
MNRRTFIQNTSIATSSLVFFNQFESLAFSKSDQDLYTLFKNPPANYRPFVRWWWNGNKIQKKELFRQLTLLKDAGIGGVEINPISFPNKADDMGIKSLRWLSDEWIDLVKDTCNEARSKDMTCDLIVGSGWPFGSEDLKEEERAEVVLVFAEKVEGPMVYETTKYSIYNAIDPQVTDKNPLRSPILMDLKLSQDPIAAIATTIDFSNQINNDIIKIDVPEGKHCIYALVKFKSFAKVINGAPGASGSILNHLNKQAVESYLNRMSSTMQDRIGPLSNYLRALFTDSMELEGCNWCEDFPAEFKKRCGYDLMPYLPFILFKVGRLGAVVDEDYGAEKSQDLNVILKKVRFDFEYTKALLLRERFTEVYLKWCKELKVKSRAQAYGRGFFPLETSLGYDIPEGESWTTNYLRHKLGEEMSDEDYRRGRGYTMINKYVSSAAHLTGKRIVSCEEMTNTYLVFNATLELLKLGSDQSIMSGITHSVWHGFNYSPKEVAFPGWVQYGSYYSEKNNWWPYFKYLNDYKARLSSQLQHGDYYTDIAILPANYDLWANNGVQTDPFPEKLNVPYTSLLWEAINKNGGAADYITDMILTQSEIIKGKIVYGKKSFGVLFLPGVESLSELAMQKIEQFVKTGGKVICIEKYPAKGLGFLNWEQKDATIKDAVARLKQQFSDRFIFLDKPADNKFLEWYTPLIATHQLPSYLNISTPNRYFMQIRSVRDDGTEMFFFQNAHRYDAYQARVVFDRKKIKGKYAWVWDLDSGERFRLTLTNDTTFEYNFGPTESLLIIFDQIKNGEKWKPLLSSGKSTLNLDKVWDLELRNSLDGSVKHVNLPQVIDMKDDKELVNFTGTAIYRKKITLTDTKNLVINLGKVYGITQLYINKVQVGIKWYGKRFFDISKYVQTGTNDIEIHLVTTMGNYMKTLTDNEIAQYWVNRKGREQEIQSMGIVGPIEIYQQN

SEQ ID NO: 1034 - protein, 1085 aa, Paenibacillus mucilaginosus
MSSTQTLRGRFDDPPAEYRAAPFWAWNDALREEEVLRQIGEMKEGGMGGFFIHSRDGLETEYMGTEWMKLVRAAVEEAEAQGMQAWLYDEDRWPSGFAGGLVQARGGDDYRAKGLTLEVVPAEKEGSGRLAERLADGAPVALFRAVIAERSLLSCTRLDLQVMFGSRMEAAAAAENTLLPPILEPQQEQHQDHETVYLLFRVEVSERSEWFNGEAPPDNLNPDTVRTFIELTYEAYEREVGGSFGSAVRGVFTDEPSIHDRHCRFTPGRAWLPWSGSFPAFYRERRGSDVLDTAPYLFFDGSLSPQARHDYWRTVTERFSEAYSGQIGEWCGSRGLAFTGHYLWENNLGTATRVCGAVMPNYRYQHVPGIDMLGEQTNETITVKQCTSVAHQYGRKVVLSETYGCTGWGFTFEGQRWVGDFQYVLGVNLRSQHLALYSIKGCRKRDYPPVFHYNTSWWKFSRVIEDYYARLSAVLTEGRPIRDVLVLHPSTTAWSMVGTGPYGFPARGKDRDVSAANRYGHEFNAFLRGLLGAHYDFDLGDEIILSEIGSVRQTEQTARLAVGMAEYRTVVLPEIRTMLRSTFLLLTGFLEAGGRVVAVGPPAELLEGRPAPELSRLYGHPGLTVVPDGAAAAAALESFLPRRVSIRHQAPQHTEPAEADKMLYMLQKADNRRVLFIVNNDREEEQQVTITLEGEGLLEEWNALTGEVTDVLVRRSQEGLLEFDASFGPADSKLYVLHTDRAPETGLNASPASEAPLLLVDPGTIRMELLQEPAGFTRTAPNALTLDRCSYRLRDGDWSGEMDVWQAQRAVREALGMRQVYGNGLEQRYRWVHEPHPGDGTPAAFRFDFEVTDVPEGEIHLVVESAGEYELGLNGNPVPGVPDGWFLDRSFDRVPLSGLRAGRNELVLSCRYHQRMEVEDLYLTGDFGVDEGRRITREPEKLQLGDWCLQGYPHYAGSMVYRFTVDGGLTPGGPAWLELGSFQAVTAEVRINRETAGHVPWRAANRLDISGRLRQGENLIEVEVMGSPRNLLGPFHHTSGDPSITSWSSFRKEGGDYSPAYRLRPYGLFGGIRLYRVQEQGGKGG

SEQ ID NO: 1035 - protein, 793 aa, Caulobacter segnis
MVKAYRPSLVLVLALAFGPAASAEPIWITHPAAPSAPTVVRFERDLTLARKPGHFPVRVSADNRFILLVNGRRVGAGPATSDLGHWRYATLDLAPYLTRGSNHLEAVVWNYVKPEEPIPDGLSPAQKNAAAFRNQRNQTGPVAQISARLGFWFSAPGAPELDSGPTWRVQLDSARSAAPVMGQVAGFYAAGPSEIVDARVPLAAPVAATPALAPGEPSPWALSADPLPQMSYRAVDPGLVARTNLDEAKAFPRQPVTIPARKTVKILLARPAMVAAYPTLRVTGGKDASIKLTYAEALIDAKGRKGLRSEVGDRTIRGLSDRFTADGGARAFAPLWWRTWRYLEIEVQTADQPLRLQGLDVAETDYPFGQVGKFVSDDPELNRIWDIGWRTARIDAHETYMDTAYYEQLQYVGDTRLQALISYAVSGDPRLATQAMDAFGASRALGGVTEGAYPSRTSNPIPPFSLLWIGMLHDYWSRHPDPEPARRHLARAREVLAWFDGYLGPDGLMRKTPGWSFVDWAVKDGRLLSRDAFPSYDAQGRSCLLSLAYLGALRDMTDLEAALGEPSLAGRDRSRAEAIAAAVRDQCWAPDRGLFADTPDKASFSQHTNALAVLYDVAAPKDAAAILDRTVGQAGIDAPTGMISTSYYYAWYLVRAFDHAGQADRYLSLLDTWRGLLALDYTTWPEERGNTRSDTHAWSAHPTADLLELVAGIRPDAPGYGRLRVEPHLGALRRLDAAAATPQGPVEVKYRRKGQRLVVEVRKPAGLSGVFVWRGQSHALLGARTRLDLPAGD

SEQ ID NO: 1036 - protein, 433 aa, Bacteroides cellulosilyticus
MNRYILFFFLILSTLTTLRAQQSRLVEVGNGYSQTSVNTTVFRNNSLVTQGDEQYISYYDGDGYLVLGKRKLDSDQWTLKRTQYKGNVKDAHNIISMMLDGEGYLHLSFDHHGHKLNYCRSTAPYTLELGDKEPMTGVDEGNVTYPEFYPLNGGDLLFVYRSGSSGRGNLVMNHYSVKEKKWNRVQDVLIDGEDQRNAYWQLYVDEQGTIHLSWVWRETWHVETNHDLCYARSYDNGVTWYKANGKKYDLPIRYNNAEYACRIPQNSELINQTSMSADASGNPYIATYWRDPDSEVPQYRIVWHDGQMWHNRQVSNRHTPFSLKGGGTKMIPIARPRIVVDGGEIFYIFRDEERGSRVSLAHAAAVGVGKWTFTDLTNFPVDAWEPSHDTELWKQKRRLHLFVQHTKQGDGERRVEFAPQPVYVLEVVKPKGD

SEQ ID NO: 1037 - protein, 910 aa, Pedobacter heparinus
MNLKRHILLTAILMLNLSIAFSQVTLQNLRCEMLQNPLGIDVARPRLSWQIASTRNDVQQTAYHILVASSLAKLTENDADIWNSGKVNSAESLYNLYAGQTLKSKNKYYWKVKVYTSKGESSWSQPAFWLMGLLHYKDWEGRWIGFDRFFTGDNEAGARLSARYFRKEFSTTKTVASATAYLMGMGLYELYIDGQKIGDQVLAPTATDYTKNIKYNTLDVTEQLRQGGNHAIGVILGNGRFFAMRQSKAYKVKTFGLPKLLLQVNIKYTDGSTATIKTDDTWKGTADGPILANNEYDGEIYDARKEFKGWSEPGFKEDKWLRAEYVQEPGGTYEAQLNEGMKVMKTLSPVSITRRPNGNYILDFGQNFSGWVKFNVKGPRGTSVSLRFAESLEPNGELFRTNLRDARATDIYTLKGEGTETWAPRFTYQGFRYVELNGYPGVPQKSDFSGCLVYDDMKTAGTFESSNSLLNQIFKNAWWGIASNYKGMPVDCPQRNERQPWLGDRTVGAYGESFLFDNTALYKKWLDDIRYAQKEDGAIPDVAPAFWRYYSDNVTWPATLLFVADMLYRQTGDSTVIRKNYPAVKKWMSYMKDRYMSSEGIMTKDSYGDWCAPPATAEDGKGVNADQKHPSALIATAYYYHLANMMAGYSALTGNAGDREGYTRLAAEVKNAFNRKFYNSQGYYGDNKLTDNLLPVYFGLVEEADKGRVVMQICSIIEEKNNGHLSTGLIGTQFLMRTLTEAGRPDLAYRIASQKTYPSWGYMIENGATAIWELWNGNTAAPKMNSQNHVMMLGDLMIWYYENLAGIKAAAPGFKEITMKPELIEGLNNVTAGYQSVYGLIKSSWTKTGKKFSWNISIPPNTRAKAYLPASMQSQVKKGATADGAKYIMAENGRVVFELKSGEYAFVVEQ

SEQ ID NO: 1038 - protein, 926 aa, Formosa agariphila
MILHKSVFKSYIYVLTYFVFFSVMSCENSSVLQEAKHLTISEGFKNPLGFYDAKPTFSWELPVVEGVISQSAYQIVVASSPDLLPNNPDLWDSNKQSSSQSVWINYEGKPLVSRQKVFWQVKYWNQDDKASNWSPVQNFELGLLNNSDWKAKWIGLPTKEEGVLGSQDNIIHRPQYLRKVFELSNDVANARLYITAKGVFDVAINGEDVSDDVMPPGYTPYKKRIETITYDVTDLIESGQNTIGVEVAAGWHSGRLGWMKSYWSDTESPKILCQLEVTMKDGSKASIISDDTWKATTQGPIRISEIYDGETYDAHLEMPHWTTNSFDDKNWKAVQAFPVTSTIKLEPKRHTTVKSKIVLESKEIILKADAAIFDLQQNMVGVPLLKVPMKMGDTLKIRFAEMLSPDGTFYTDNYRSAQSTDYYIAAKEGTIEWMPKFTFHGFRYVELSGFDASKTPSKNWVKGVVQYSNFNENGSFTSSHEKLNQLQSNIVWGLRGNFFDIPTDCPQRDERMGWTGDAQVFGPTSMFNADVYKFWASWMQSVRESQYDNGGIPFVVPDVLHNGKVSSGWGDVCTIIPWKIYYRTGDVGILEENYDMMKKWVAHHQATSKDFISHMNSFADWLQPYPENGNNKGDTSHSLIGTAFFAHSAKLTAKTAEVLGKKEEQATYEALYKSVAKAFENAFFKNGKVKDVTATQTSYLLALAFDLLSEENKENAKQQLLEKISEADNHLRTGFLGTPLLSEVLDETGEIDLMYKLLFNETYPSWFYSINQGATTIWERWNSYSKAEGFNPMKMNSLNHYAYGAIGEWMYERITGIAPLQAGYKIISIAPIPKAPLTSASATLNTPYGEVASSWEIKNETLFLEVVVPPNTTAEIEIPTDNSESLKVDNENFTNGKNLKLIKNEKRKIKILAQPGTYEFQAKYSL

SEQ ID NO: 1039 - protein, 929 aa, Lactobacillus acidophilus
MKITNILVNQMEHPLGFDLSNLRITFELTEMENIIGNVYKNISVGKVESEQPIYFEPDELYENNAFKINMELEPRTKYWVKIGVRNDNEVTSSNTWFETGKMDEKFYGKWITNKKDVENTLFKKDFELANKQIKSARLYSTTLGVYEVDLNGVKVGNEFLAPGFTNYDKIVQLQTYDVTKLVTKNSNNELVFSVGDGWYKGNLGFDGGQTNIYGDKKSILAELHVTYTDNSEQVISTDSSWLTTEGKIIKSSIYYGEDIDDTKDILDWSSVVILNKSTSIVRDRLSLPIMKKEVLKVKEIIHTPKNEIVLDFGQNHAGWPVFINRLARGKKITLQMGEILQDGNFYNKNLRLARAAFTYISDGEEKLIRPHFTYFGFRYVKISGVTDVNKDDFESWVLYSDLKQTGFIKTNNDKVNRLFKNVIWGQKSNFMDVPTDCPQRDERLGWTGDAEIFAPTASFNMNTYEFYKKYAKDMLVEQEDNKGMLPIIVPSLKQKSTGMAIWSDAATIIPWVTYRFFDDLGVLKQNYSQMKNWVDWITQNTKTKYLWIGQMQLGDWLSLDNGANPQGKTNEDYIASIYYFVSASIVSKAARLLHYDMESDYYENLARNIKTNILNEFVTEKGRIAIDTQTALVLALHFGLVHDYQKSQVVADLVKKVKDDNKHLQTGFVGTPFLLSVLSNNNQHHLAMDIFMQEDCPSWLYEVNMGATTIWERWNSVLPDGKMNPEGMNSLNHYSFGAVMMWMYQCVVGLNQFDAGFKEIYFAPKFDCRLKDIYSEFDSTYGKIKVEYHLETNEKHLIRMNLVIPFGVKMKVKLPRSAKYLINGKEKIGIVKLEYGKYDISYIPTKSYLNYYDLNSKLVDILDNNDLVKRIDQIDEKILQKVKRMGNTRSIFINKKIDELLDFEEISQEEKNQLVDILHKTIFIKLNLF

SEQ ID NO: 1040 - protein, 1179 aa, Rhodopirellula baltica
MNEDGWQDRRQLPRFSWIRLAKGRSAELSSIPVRPLKMLLSILFLTVITVAASSSVSALEPQRLRCEYLENPTGIDAARTRLSWQVTSDQRGQSQIAYRLLVASSEEQLGSGVGDLWDSGKVKSDQTLFVEYAGKPLSSRQECFWKVQVWDGAGNATESEVASWSMGLLDQSDWSAEYISYRDDSPIHTDLSTLHLPAARQYRKEFSASKSIKRATVYATALGIYELHLNGQRVGDASFAPGWTDYRKRAYYNTYDVTNLVREGDNAIGAWVADGWYSGYVGFGLLTGMGPEKNGRSTYGKTPSFMSQLEIEFEDGTKQTIGTDTTWKVTGEGPIQEADLLMGESYDARREMVGWSEPGFDHDHWDDAILAKQNGQVTAAFYEFRNPTTTGAGVKKVGEQRDFGFKRPELEAFPGVPVRVTQEIPAKTVSKLEPGTFVFDLGQNFAGTIRLKIKGREGERIQLRYGEMLHPDGRLMTENLRKARATDYYTCKGNPDGEFYQPRFTFHGFQFVEVKRLSDSSEDAGKATDSQNVQTPPLDMVTGLVLHSDTPMASTFECSDPMVNQLFKNVLWTQRANFLDLPTDCPQRDERMGWTGDAQAYVATAAYNADIGAFYTKWLRELMESQRPSGAFPGYAPYPFQHGWDFGTAWADAGVICPWTIWQFYGDTRVIDDCWEPMTRFMRWRKQTSVNDLGVSHGNAWGDWLSQGEETPLDYIDTVYFAISARMMAEMAEATGRDEEAKLYREQRAATQAAFQAKYLNEDGSITVRTQTAQALALFADLVPAEQREATGKYLAKRLSENGNHMATGFLGTRPLLPVLSGSGQHDLATFLLQSREFPSWGYEISNGATTIWERWDSYTKEDAFGRHNAAMNSFSHYAFGAVCEWMFATLAGIQSDGPGFKRIVIRPTPPSPGSNAMHEPINWVKASYESIRGTIRSEWKMVDGRFHLNVTIPANTTATVYLPTNDANSITESGNALADTANVSLLRKETNVVALTVHSGSYEFLASSGIVPAKVSLKSSEPKDNSINPGEIDLTDATKLESWDFRNPQDLAKWGERKSVDIEQRNGSAYLVATGDDSQMAVRMTKPLEGKLVIELRASPSQNSTSQFYWAIPGRGFNGQQQTKRLLRQSDAVNAYLFAIPDALTVGKLRFDPFATYDEYANAGEMMIESISIYRLVD

SEQ ID NO: 1041 - protein, 862 aa, Frankia inefficax
MRAIRLRTEYLTEPLGLGITAPRLYWNADGGLRQTAYQVVARRGGETVWDTGKVASSRMTHVRYEGVPLGSRDRVDWSVVLWDEAGAAGPPAESWFELGLLDPADWTAEWITGDYTPEPDVRYPVDHFRRDFRVREPVLAARLYITAAGVYEAVLNGEPVSEARLGPGATDYRHRLHYQTFDVTSLLAADNVLEVRLADGWYRGSLGAFGATHVFGRETRLLAQLELTYPDGSTETVGSDERFRWSDDGPVRFADLQDGEVYDARLAPSYSGHARITTETMIPTAADNVPVTEHERFPARLLTTPSGARVLDFGQNLAGFVAFTVSGRAGQRLTLRLGEILDGAGEFTQRNFQLRKPVHEFGRDVEILLLTGQESEIKGELQPTPKQEVVFTASGGTDHYVTRFAVFGFRYALVETDLDIDPADFEAIAVYSAMEQTGTCVTSHEGVNRFLENTRWSMKGNFLDVPTDCPTRERLGWTGDAQVFFDTAAYLMDVGAFFRKWLRDVRDGQLADGKLSAVIPYNGTSMLYDTTGGSVGWADAVVLIPYRYWKRYGDESILRDCYDAMRRYAMFMITNAGPLDPEAAADNPHARYLYEKGVHLGDWLEAAEFRDPSPGRTPMPEEATAYLHYTMTHLAEIATVLGETADADLFAEYAQGAKAAYTHQFLRDGTLDTDRQAKLVRPLALGLADGDVKRRLEDRLVQAVKNRDFHVNTGFLSTPFVLPTLTAAGHPEIAYRMLDNEDAPSWLAEVKAGATTVWEDWEGKESRNHYSPGAVCQWLFDTVAGLRVTGENHFTIAPVPGGSLTSAQARYTSVYGTVASSWTRTGTDLHLTVTLPPNTTADVRLPNGTEHVVGPGTHEYTA

SEQ ID NO: 1042 - protein, 880 aa, Streptomyces scabiei
MNPTAPAEQTPTDITVSVTGLRTADDSGLVATAHAMPRLSWSLTGTRPGILQHAYEIQVSGAPSFDDTTSSGQVESGTVTDHPWPAQPLSSRETRHWRVRVRTDRGWTRWSDPARVEGALLDAVDWAARPVHVPSDRGRPSPGPVPLLRREFHLPAEPVSARLYVTSLGVHRTTLNGRPVSADLLEPGWTSYPDRLLYATYDVTGLLRPGPNALAAAVGDGWFRGHLTWHKNRDVYGDTTGLLAQLEVDLTDGTRVTVITDGRWKGGYGDLLSADLYDGCERDLRAEPHGWQLPGFADDGWEPVAVLPLPEGLGQRAHPPVRVVRTVRPRLRTLADGTIAVDAGENVTGRLRIRADGRPGGTVTVRHAEVLDGDGRLLTSILRGARATDRYTLAEGPADLTPEFTFHGFRYAEIDASPDVSVEAVEVEVVAGDLRRIGEFHCSDERVNTLYANVVRSQRGNFLAVPTDCPQRDERLGWTGDIMAFAPTACATFDSASFLDSRLTDLRIQQRPDGAVPMVVPDVPLGELPPAELPFAGAAAGWGDAATVVPAALFEAYGQPHLLERHYTAMRAWVEFTVAHLDEDGTWSGNAQLGDWLDPAAPPENPAAATTDSGYVATAFVAHSARLLADAARELGFPEDADRYTALHRRTAEAAWRKWGDHARTTQTGCALALEFGIAPAGERAEVGKALASLVRANGGRIATGFLGTPFVLPALGDTGHVAEAYELLLNPECPGWLHQVSRGATTMWERWDAIGPDGTVDVENAGTMLSFNHYAYGAVASWLYRSVAGLRPASPGYRTLDIAPRPGATLTSAEAAVDTPYGTASVAWSIGDGSLTVRAVLPPGTTGRFSAPEGWTCTEPVDALASGSHVLSLRPLTRP

SEQ ID NO: 1043 - protein, 931 aa, Flavobacterium johnsoniae
MKLSLKTFFYTMLLFSFFHAFSQEKLVSPWPESSNINQPWARWWWMGSAVDKPNLKRSLIDFHKAGIGGVEITPIYGVKGEENNFIDYLSPKWMEMLDYTIHVSDSLKMQVDMVLGTGWPYGGSHVTLPHAATKLIVEKYTVKKNETFDRDITVDSSKEKTPASLLYVVAYGNDGSFVNLTNELQNKKVNVKDKGLEGSNIKLPNKLEPNKLNWKAKKADYTIYAVFSGKTGQQVKRAAPGGKGYTLDHYSEEALKAYVIPFNEALKGREGKIRAVFNDSFEVYGTDFTPNFFEEFQKLRGYDLKKQLPVLLNETDNEIGNRIRSDYRQTISDLLLNKFDKFWTNWAHSKNFKTKLQAHGSPGNLIDLYASADIPECETFGSMPFDIPGFRRDKEDIREGDADPVMLKFSSSAAHISGKNLVSSETFTWLREHFKTALSQCKPEAEDLMLNGVNHIFLHGSTYSPDRAVWPGWQFYASVNFNSNNTIWEDAPALFSYISNCQSLLQQGKPDNEILLYWPIFDAWDKYEKGTLFYQFKIHSLSDWLYGTSFYDTTKNLMKKGYSVDFISDNFIAEAKVVNGNIVLPGGNFKSLVIPSCKKMPVETLQKLIELKKAGACILFEGLPESVPGFKDYKKQEQNLKNLLAENKIQAVSNIFTSLEDAKILPESLVNTGLKSIRRDINGEKIYYLVNHTAKTIDDFIPLQVENKEIILLDPLTHESGNAIVNKKDKITYVKIKIEPGQSYFLKTENTASQKKWNYFESASEPIALKGNWKLSFDKGGPKLPADAVVSNLESWTKLSPDAEAFSGSAAYTLQFENPNPKIENWSLNLGDVRESAKVWLNDEFIGTAWSVPYKLNIQKLKPGKNVLKIQVTNLPANRIRDMELKGQEWKIFHEINMVDKDYKKFDATKWIPMPSGLLGPVTLTALKQEN

SEQ ID NO: 1044 - protein, 1014 aa, Unknown
  Streptomyces sp.
MHETHPRRGGMTRRSVLAAGLTTGVLAALGPAAEAAASPAASPAASPAASASAGATPTASWFAAPARAVRPKFRWWWPDGLVDPAEIAREIDQMADAGFGGAEIAAVHHSISDTSVLDTAHHGWGSAPWRDGVKAALRQAARRGLTVDLTLGPSWPVAVPGVTPDDEAAVKELAYGKATLTGGAAFDGPVPAPVYAPASGVTVQKLFAVQAARVDTAYSSGKATGLDVDSVTDLTNRVADGNLRWTPPDSGTWVVLSYWQRGSGQQPEAGPHSSPAAYVIDHFSAAGTAAVTRYWDTAILDSTLRKLLKAAGGAFFEDSVELESKGLQWTPGLPDAFRAHTGRDLLPYLPAVILDNSNQVFAFEARLTQEIRHDFWETVSNLFNEHHLGALKKWAHGHGMKLRSQPYGLQTDAIASAAVLDIPEGESLGFKNLDDYRCLAGGRDMAGSRVLSCESGAYAGGAYNTTWDKFLRTMGGAYAAGVNQTVIHGFSYATAPGVSWPGFAAFSPYSGAPGYGESWGPRQPTWHHVADVAGYIGRVQQVLQSGTVRADVAVFRQTGYTATGIGASWLTSTGVPLGWTHQFLSGPLLDLPNAKVSGKRLAPDGPAYKALFLEGDFFYGSTPTLSVDDAHKLLKFARAGLPTVLLGAFGQALTPGLPDDGETDELRALTAELLALPNVRNVTDKTLVGAAFAELGVTSDVSYSVSSTLLNAHRVTDDADFYYLCNGKHAETVKPPVAAIDHDVTLRSTVRGGAGTVPYLLDPWSGRVTRLARYTRDGDAFTFRVTLQPGETLVVALGRPGLFGNRDGNRPHAVATDADEALFTGGRLAVRASAAGTFTTTLSTGRKVTTKVAEVPAAVTPDRWTLSVDDWRPGADATSTEVVRHSLTLDALLPWSQIPELADVGGIGTYRTTVTLPKSWSSATGALLRLGSVTDTCRVTVNGVRLDPVDRVNPVVDLGGRLRKGANTLEIEVATPLFNRLRVSNPAVFGTAARQAYGLVGPVQLVPYVQRTVA

SEQ ID NO: 1045 - protein, 897 aa, Acidobacterium capsulatum
MLVGGLATAATAQTNLQQLEKTFQNPPDNAKPMLRWWWFGPSVTKPEILREMQQIKAGGFGGFVIHYVYPLALDDPQTGFRNLPFLSPAMLSDVSYANRQAHALGLRAGTALASGWPYGGPMTAVTEAAAKIVQKESTVAPGAHSVALPSIGNGQKLLAVFAQDGSAGSQQKMLPLPAPVTLRMAIPTGTHIVDWYLMSRTGQQVKRAAVDANGFVLDHFSHHAVADHLKNVGDKLVAAFGSEPPDSVFSDSLEVFGADWTPDFLEEFRKKNGYSLLPYLPDLFMKHPDAQALAVRHDWGVTLTALIDENYLTQVNAWARAHHTHLRAQVYGPPAVSLSSNNLVDLPEGEGPQWRQFAYTRWATSAGHLYGRPIISSETFTWLHSPAFRATPLDVKAEADRFFLQGVNQIYCHGWPYSPPSAGEPGWRFYAAAVFDAHNPWWIVMPEVTQYLQRVSWIMRQGAPANRVAIFLPEDDAWAAFTPGQVALTGLLPRWITPQLTQAIENSGYDFDYIDAAAIQARGIHYSLLILPNVDRISPAALTAIQQYEKSGGKVIALGRIPAHAPGFLHYEQISAEVNRESHAFFGHPGARVRVVQAVSGLGDALHQMLTPAMTLSAAKPAVGFVRRKLDDADIYFLANTSNVSIHTVAHLRSRYTSGTWLDPMSGKAYAAQSRNGGWPLHLAPYGSTILVLHAKNVRLPVAAGHDSFNPSSTKAIADLSSDWNVSFPALHLQEPMATLASWTKNEKTLYYSGVAVYRRTLEVAQNDLDHAPLLLSFGQGTPVSPSAFHRQMGTRAWLNPPVHVAAVVYVNGRLAGTVWHPPYVLAVGGLLKPGANQIEVRVANTAINEMAGKSLPDYRLLWARYGRRFEPQDMKHLQPLPSGLLGKVELLEGESR

SEQ ID NO: 1046 - protein, 1146 aa, Catenovulum agarivorans
MQYWQKQLKFTSIILLSGLTLGGITACAEQDIAQLQNVEAEPSPVEQEAQTSLATSFKHPPHEAKPLTWLHAMSGNMSKAGLTKDLEAIAEAGLGGTMLFNVTQGIPLGKVKFNSTEHIDLIGHLAAESQRLGLSFGMHNCDGWTSSGGPWVTPEHSMKQITYNETIVDGGNVNIKLAQPATMLDYYQDIAVIAYPSLATEITDFTVKPKITASDANFDAQIVQNNNLTDYSSITPSNEQPGWLQFSYQQPYTLRLIDMLLHSGRGLNVSLHISDDGKNFKQVDNLTLRRPGKSTYAFDEAFAGYTAKHFRLVSNKVMHIKELRLSSTPSLDNFSGRTAASRSDYQEFEDIGKPSAELVIDPESVINLTASLNSEGQLITTLPAGKWTIMRFGYTSTGAVNIPASREGTGLEVDKFSKAAFKSHYDAYITNVIDKLKVVAPNALYSIEIDSYEVGAQNWTHNYEQLFQAQFGYDLVPFLPLFAGKFVESPTVAEAVLWDTRDLNNKLITENYYGYFRELAHQDGIKTYLEPYGSGPFNELDVASKADLPMGEFWLDNNNFRLSASASAAHIYNKPIVAAEAFTQFPRNNWLFHPAEGKADSDKSWALGVNQHVFHRFAHQANTHVMPGMTMNRWGAHMDRTQTWWTVAGKPWFKYVARGQQLLRTGHNVADVLWFLGDATPTTCPEKDPISAVLPLNINYDCLNSEVLQRLSVEDGKVTLPHGSQYKILVLNNHQTLTLKSLKKIYQLAQQGAVIVGTPVEQLAGRFVSEQQRQELKMMVDYIWSQPTTYNISTKAKTSHGHTGVFPTHEIAKTSKIDWQKIYNEQNWPLDLAIKNADKFYFTHRRSAQYDIYFIFNDSAQAQVFDARFNISGKIPELWDADTGNITQLGAFSDNGQITRVPLKLGAYDSVFVVFEKSSKAVTALKPEFVLSQPELDVVLDAQQQPKVIKTTHEAIEITGAWQVEFDKFYGLDKSFTFEQLIDWKLHPEQTIQDYSGTATYQKTIDVPAELLADNKQIFLDLGKVKVAANVYLNDKLAGSAWHAPYRIDISNFVQAGKNKLTIKVANLWVNRLLADRKLPDTSGFKIARWQNPITPMPQWYVDNQPAPKSERVTFVTQVFMDDNEPRQSSGLIGPVQLSVRSKTQL

SEQ ID NO: 1047 - protein, 899 aa, Brachybacterium faecium
MSSHTAQHVLDALTHPDPAARPMMRWWWFGPDMDRAEIDRELRAMAAAGLGGAEIALVYPLRPGAPDYLGDEALGHVRHAAERARELGLRLDVTLGSGWSYGGPHIGPEQAARRLRWERRDLGPQPLSWPLTPSWPGDELVSVHLGEGLPPSGWTRLDPVGERLEIPAGRGPRTVLLAWSEVTGQQVKRSAAGAEGPVVDHLSATAVRHHLDVVGGALLSAVPAHLLGSVFSDSLEVYDAGWTAALPEQFRQRRGYDLLPVLHLLEVDAPGAEQVREDYGLTLSELVEEGFVGTCRAWAEEHGVRFRLQGYGQPPITLSAQRGAHLIEGEGAGWTALTQSRWASSAAHLDRREVVSSEVWTWVRSPAFRAAPLDLLGEAHEHLLLGITHFVGHGWPYTAPDAPGLGWTFYAAGALDDRNAWWPAMPELTAHLTRLCAALRLGAPGAEVALYLPYADVRAARGRGHDLWAACRAHIGEQLPAAIRRAGYDLDLLDDDALAALDPAAYPVVVLPRVSRLPAETRRWLDRVRAAGGSVLAVDSPAYPAGQQLSLPEEDGDDARLRDHATLAMVGARGGSDAEGEEGADGEGADGEAAGGKNPLAAALRGAHTPPLLLSGDGGEVGTVHRRLADGDLHLLAHTGPRRREVEVTPRDPRRALALHDPAEPGLRPLPSTGARLVLHPYQAVLLLATDQPLPAPDGAAPATDAAHGPAQTGTAEPEPIALDGPWTASRPGEAPRAVTLPHLLTGQDAADLRPLLLETTVTLDEDTARGPLVLDLGPGRAVPHTGEGSGYRALLEPPVREIAVLEVDGEELGVLWRPPYRIALTGRLRAGTSRLRLRIHGTTAAAAALPENAEAAAGQVAAAHETYGERFQPQELERMLDGVATGLASVPVLRRAGG

SEQ ID NO: 1048 - protein, 523 aa, Klebsiella oxytoca
MSQAIQHNSQVMMTRHPNFLRTAEALRPALSRQAHPPIAVVEAHADAAALFGWRAEPVSTLAAFYQRELSSGDSVIIDFGSHYVGYLHFLCQSAGSPPDAPAHLQLTFGETLSEVCEPFSDYQGWLSSSWLQQQDLWLDVLPAEIDLPRRYCFRYLKVEVKAVSRKFRLQFTQIEVNAVTSASGACPAATTSDPQLRAIDNVAVLTLQNCMQEVFEDGPKRDRRLWLGDLRLQALVNDVTFARHDLVRRCLYLFAGHTREDGMVSANVFVQPDVIADDTFLFDYSLFFVDVLYNYLQSAEDMATARELWPTARRQVELALTRCDASGVVRDSDDWWVFIDWQASLNKQAAAQGVLIYCLQRAIWLAERFEPELAVSYRQRLQQLKSAALDALWDPQQGFYVSGARRQVSWASQIWLVLAEVGTPQQRREIMRNLEKNPPAVAMNTPYLRHHYIAALLQCGLRDEAIAQIKAYWGAMVDYGADTFWEIFDPAHPDFSPYGSKLINSYCHAWSCTPAWFIRQYGL

SEQ ID NO: 1049 - protein, 923 aa, Chitinophaga pinensis
MKQCMGIWLLFLSLQTWGQQLQVVHLRTDNKTNPLGCQLSPRLSWQLSASYNNCVQQAYQLQFSDDSTTLNSKKHTGKHVESADPFLTLPAAFAGITLLPAHTYYWRVQVWDKAGRPSGWSEVASFINALNGPADWKGAKWIGYEDVVDSMRVVPGVHNGTDKFYQKHKARQRTIVPLFRKAFSVQGKVKSALLYISGLGQYEASLNGVRLGDNFLAPGWTHYDETALYNTYDLTNVLQAGENALGVIVGNGFFNVNKERYRKLSVVYGMPRMICRLLITYENGKTTNIVSGTDWRTSASPITFTSIYGGEDYDAGKEQSGWDQPGFNDTEWKPAIVVKATEKRLLPEEDYPVKVMEVLPVRRITQPQPAVYMYDFGQNASGIIGLKIKGKKGQTVKLIPAELTNDKQLANQKATGSPYYFSYTLKGDGIETWQPRFSYYGFRYVQVEGAAPDTAVHTGDVPEIISLELLHTRNAAPVNGTFSCSNDLFNRIHTLILWAIKSNMQSVLTDCPHREKLSWLEQDYLMGNAIQYSYDIDLLYRKLIRDMKEAQTGEGLVPDIAPEFVFFDDHGFGFRDSPEWGSAGVIVPWLHYRWYGDKTVISDAYPMVKKYVAYLGAKAQHNILSYGLGDWFDNGPQRPGVAQLTPKGVTATAIYYYDLVLAGNMADLLGKTAEAKAFRVQADKVKATFNGEYFHTGTKVYSTGSQTAMAMPLCVGLVEEQYRQAVFSNMVDSIRQQRNQLTAGDIGFHFLVQALQEGGASDLLYEMNNRSDVPGYGFQLAKGATTLTESWAALEQVSNNHLMLGHLLEWFYTGLGGITQQAGSIGYKQLQICPEVVGDITWVKTSYNTPYGTVRSEWEKKDGGMLFRISIPPNSNAIVKLPAKREGRITADGKPLNNQDLSFEKERVVMYLGSGDYEFSTFK

SEQ ID NO: 1050 - protein, 907 aa, Streptomyces bottropensis
MNNAPYDLRIDTGGDQFAVSGPAPRLSWKPPSDTGHPAGYELECTVDGDAQPALRVAPGRHRFLPWPWAALGSGRQVEWRVRADGPGGPTPWSEWNAFEVGLLDEDWQARWISPAESGDPGYGKRPAHTLTARFEVRAGVRSARLYATALGLYEAYVNGERAGTAELSPGSTSYDRTLHAQASDVTAAVRAGGNLVEIVLSDGWYRGQVGAFRLPAGWGTVLGARAELHIAYEDGSRQVVRSDETWTSTRSAITRADLMDGQSTDFRAGRDTEQPVLVDRVEAAAIDWSPAPPVRVVASRPAQSVKQLRDGLWIADFGQNASGRLAVGDLGPAGTRTVIDYGEHVGPDGDLTTAHLDSSRPGEEPIPFVQRDEVVSMGRGETFEPRHTVHGFQYARIRRDGAPLDPASLTMRVVHTDLRRAGSFACSDDDLNRLHEIADWSFRGNAVDVPTDCPTRERLAWTGDYQVFAPTATRLYDVLGFSRKWLRSVRDDQLPDGRIANFSPDGRRIKHHLDDQFAMMTGSAGWGDAIVAVPWELYQSYGDQEILAENWEAMVRWVEWALRTARTARHHSRRERSAEPRPHERYLWDGSFHWGEWTEPRTKTADGTRIDPVKTDPVAWFMADKGEVGTAFLYRSTSTLADVARVLGRTEDAARYAETAEHVRDAWRTEFLTPDGRTTGDTQAGYVRALSLGLVPAELRPAAAARLVELIRSAGTHLGTGFLATGDLLPVLADTGHTDMAYELLLRRTAPSWLYMLDHGATTIWEDWEGIDENGDAHDSLNHYSKGAVIRFLHTHTLGLRQAPGSVAWESVEVAPVPHPSLTWARGTHESPQGTIAVEWRTTGDELTLAVDVPPATTARVVFPDGTTETATTGTFRATRRITCASSARSARAPGDEPLVRSEGATD

SEQ ID NO: 1051 - protein, 854 aa, Subdoligranulum variabile
MDGGPLFLSWQCTGGLRQTAYEIHLTADDALVWESGKVATQSMHADAPAVEGARVRGSWKVRLWDENNCPGPWSGARFETGLSTGEWQGLWVAPETAPLDIPGDDAINAFARPNWERKQAEKEAAGKGAAEPYQPHRPASYLRKTFTAPSGRGRLYITAKGLYVAWLNGVRVGDMVLAPGSFTADKHLGAQTYDVTALLREGENELLIALGDGWYRSTSGVDGDRNLFGDTLGVLFQLEVDGKVVCVSDDTMQATQQGPIRQNDLQQGEVYDARLEGLLSGWHEVQTYRDALPVTGMNTVPIREREAFPGRLFTAPNGETVLDFGQNIAGYVEMTLTAHAGQKVLLTCGETLDENGNFTQENFQDRSRHNEGGTAQMLELICKEGVNHWKPSFTIMGFQYAKVETDADLTGAVFTAHAVYSDMAVTGSFTCGNKAVNRLVANSIWSQKGNFCDIPTDCPTRERAGWTGDMGVFIETGLTLMDCYPVVAKWLKECRLNQYPDGRMANIAPPNSRPGYMTPMLCMSAGWGDAAILVPYALYKRTGDRRILADNYEMMQRWYAFLLGRAQQTTEEQQSGEYAKYTVLNGLDYGEWCEPGVTPMQAMANPRKSVGTAYLAYSGRLLAEIAAVLGRQEEADAYRATADKAVKAYRAAFTEDGVIHSDRQCEYVRAIAFALLGEEESRAAATTLNQMVVDNGCHLNTGFLSTPFLCGVLAQYGYIDTAYRLLLQPEAPGWLYEVNKGANTVWETWTGIDAEGKPHESLNHYSYGAICGWLFGGVCGIHFTDGQLTIAPTPHKALGYAKAVYDSPAGRIESGWRYEGDTVTYEFTIPTNITAHIHLPDGRTRMLSAGTHRL

SEQ ID NO: 1052 - protein, 947 aa, Microbacterium testaceum
MTTDTRVAAVKAELRTDSPFVATPTPRLTWRVETSTPSWRQASAEITDGATSVPLEGAESALVAWPFAPLEPGERREVRVRVTGVDGAVTAWSAPLAVEAGFLAPDEWVAEPIGLADPEREAQPALVQTAFRLDRPVRRALLLWTALGSAEPEINGRAVSDDVLAPGWSATRDRLVHETVDVTDLLVEGDNVVGATLAGAWYTERYGFFTFTDRIYGDQPAFLAQLRVTFADGTVETVAPTGSAWTATGDAEIVTSGIYAGEHQDLRLRAPWSTPDATTSGTDRRWAPARVGVVARPGHENVPLPEARIAEPVRRHESLPVVARLATPSGGEVLDFGQNLVGRLRLRVRGEAGTTVTIRHAEVLDEGELALRPLRNAKAEASFVLSGGDDVLESRFSFYGFRYAQITGIDVTDAQVEAVVLHSDMERTGWFTSSHALVNRLHENVVWGMRGNFLALPTDCPQRDERLGWTGDLQVFAPTASFLYDCDGFLTSWLRDLALEQERAGGIVPLVIPAALPSFAGGGPVAAWGDAAAVTPTVLHERFGDIGVLAAQYPSMRAWVEAVRADAGDSGLWAGRMQLGDWLDPSAPPDQPGKAKVDGDIVATAYFARSLRQVAEAAALLENTADAETYHALAERSRRAFVSEYVTPAGRMMSDAPTAYALALAFDLVQDAPTRAALADRLAALVRESGYRISTGFVGTPIIADALSDGGHHDAAERLLLQTQCPSWLYPVTQGATTVWERWDSLLPDGSVNPGEMTSFNHYALGAVADWLHRTVAGLAPAAPGYRRLRVAPRPLAAFEHASARHLTAYGPAEVSWEREPGSDVVRVRAIVPPNTTAEVALPGTLADGSEAPAEVGSGTHEWRVTLPAVPVRPPLPGLEAMLADVIDDPRAYAALLDALEETAPERVEGVRSGTVWGAGRPLASALMFTPPDVLARVDRAVRDATA

SEQ ID NO: 1053 - protein, 1080 aa, Solibacter usitatus
MKRAALLILLAGTLFGAASVRPQQLRCEYRVNPQGIDVKDPRLSWILAPVNPKGRGLTQSAYRILVSSSEAALRGNSGDLWDSGKIVSAESTQVAYQGKPLNSGTAAFWKVQVWDQDGQPSDWSAPAQWSMGLLRAEDWKGRWIGRDEAGVYKDSASDYQLLERARWIWDAGNAQAGAPVGNRFFRAAFTVPAGRKVTRALSVIGADNTADVYLNGEPIAVESKLPLPHAVDITHLVRPGENVIAVRATHSRADRPAGLIGGVRVEFASGDPVLLQTSNQWRTVAKPDPGWENPGFLDAAWQASKDLGAFGMAPWEGVGFLAQHRLPGRLLRKEFALEKKLRRATVYYSGLGLSELYLNGAKVGDHVLSPGLTDYDKHVLYVTFDVTRQLVQGKNAIGLMLGNGRYYAPRNDVPIKTRDFGYPKALVQLDLEFEDGSRANVVSDETWKYSADGPIRANNEYDGEEYDARREIAGWNKAGFDDAGWEAAKIVGASSGAVVAQMAEPLRVTETVKPLGVKKLRPGVFVFDMGQNLVGWCRLRVTGPKGTQVKLRHSETLKDDGSLYVDNLRSAKAEDIYTLKGVGAEVYEPRFTYHGFRYVEVTGFPGEPSASALDARVVHDDMERAGEFTSSSGLLNKIHHNMFWGIRGNYRSIPTDCPQRDERQGWLGDRGQVSRSESYMFDVAGFYSKWMTDLEDSQRPSGSIPDVSPNYWPLYNDDLTWPGTIIFIHGMLYDQYGDKRVLARGYPAMKKWMDYEKTFVKDGLISKDQYADWCVPPEDPKLIHSQDPRRVTDKTLIATSYYYQFLRTMSRYARILDRPTDAADFDKQADQVQDTFQRRFFKLESGMYDNGTQTSSILPLYFGMIPADFRPAVVQTLVRNIELQSNGHVGTGLVGAQWLMRTLSDAGYADLAYKIATQKTYPGWGYMVEQGATTIWELWNGNTADPAMNSGNHVMQIGDLAVWMYEYLAGIRTDPEKPGFRHAVIRPYPAGDLSFVKATHKTMYGPLASSWKREKGEFMLDVTVPANTTATVWVPAKDAASVTESGKKATDVKGVKFVRSENGSAIFEVSSGAYSFKSGI

SEQ ID NO: 1054 - protein, 1061 aa, Streptosporangium roseum
MEQAVAAALAVTDLRMDGRTEPLGLGESAPRFSWRLAAPGRGRAQSAYRIVVGRECDPLAEGAEVLWDTGEVGSSRTFDIAYEGAELRPRTRYQWRARAADEAGTWGDWSPAHWFETGLGDVTGWTADWIGTPAVPGSQRLPSLENVPRIWAAGPLGPSEARTGGFRTRFTVPGGARPLSAWLVIGGALDPQVHLNGMPVAGEVRDGAFVADAGDLIDSGENVLALRAGAVDGLPGGLCVRLEVVLEGRPALPQLVPVAGESAVTVTSDGRWRAAGEPAPGFEQPGFDDTGWSLAEEVGLHGDPPRGREPVADRPSPYLRREFDVPRPVSRARLYATALGVYELHLNGMRVSADHLAPGWTDYRHRVTYQTYDVTALVAEGGNALGAVLADGWYAGNISWFGSFQYGRRLALRAELEIVHDDGTTTRLRTDSDWRAGSGAIRYADLQNGERQDLAAEPVGWTACGFDDSGWLPAVPVSPPAGRPAAAVAPPVRVHEELAPRAVWESSPGVWIADFGQNVVGWVRLTARAGRDRPVVLRHAEVLDHEGALHLANLRSARATDEFLPRGGAGAETFEPRFTFHGFRYVEVSGLREPLTSDAIRARVAYAAMEPAGEFACSDERLNRLQGNIVRGQRGNFLSIPTDCPQRDERLGWTGDIWAFAPTALFNYDARAFLHSWLTDVVDAQAEDGAVTHVVPDVLSGRGLSPNPREAGSPGWGDAIVMLPWALYRLCGDADAVARYYGPMRRWLAYLDSRSTDGIFPDEGFGDWLSIGADTPKRLVGTAIFALSARQLAELAAALGRADDERACLEVYARVRRAFRAAFVQGPGVVESGTQTAYVLAITAGLLEEAELPRAAARLVRDIEARGGHLSTGFLGTPFLLDALTRSGHLGTAYRLLLQESFPSWLYPVVHGDATTMWERWDGWSHHRGLQDPGMNSFNHYAYGAVGAWMYETIGGLAPASPGYRAIVVRPRPGGELTWARTAYRTRHGRVEIAWRREGGDFTLEVRVPPNTRAEVWVPGGPAGVTESGRPAAESPGVALDRVVDGHAVYEVGSGSYAFHV

SEQ ID NO: 1055 - protein, 1132 aa, alpha proteobacterium
MRKAMILLTACLLSGTSALAADTLRDGFQTPPDSAKPRVWWHWLGNNVTADGIDKDLAWMRRVGIGGFQLFSGNLETPLLVDKPVVVFSPEWRAMVRHAAERADALGLEMTMAASAGWSETGGPWVKPEQAMKKLVWSETVITGAKRFQGRLPSPPTGNGPFQDMPMPPELRLPPPPPVPGARPRPPAAAHGPSPSYYADVAVVAYRLPDAVVPLGSLKPRISSSAGDAAILSDGRYDAPLRLEQKTPDGQLAWVEYTFDKPVSLPAVTLAATIEDPLNALSPSGVVEVADENGTFRDLVRVAPQEPVAFPAAAPVRTVALPEASSRRWRFRLDPIPPQALALPGMPQQTVHAVTELRFETEAMVDRWQAKAAYDTMRSYDTGPQPVRPVPARDQVVNLTARIGADGTLDWTPPPGRWQVLRIGYSLTGAKNHPADPEGTGFEVDKLDAAAVRAYLEGYLGPIDQALGDLRGAKGLKNLLTDSWEAGQANWTPALPAEFKRRRGYDLTPWLPVLTGRVVGSAADSERFLWDFRRTIADLLAEAHYKTIRDFAHEKGLGYYGEAMGTRLPTTGDGLLNKRYTDIPMGEFWQMPPGAPSDPAHTSDIAEAASAAHFYGQNLVAAEAFTALPFMPPFTATPAALKPFADRFLARGVNRFVIHTSVHQPSDDLRPGITLGPFGQYFTRHETWAEQAGAWMSYLSRSSYLQQQGRHVADIAWFVGEGGAISAPDPDRLSPALPKGYRLDFVARDAVTELLSVKDGHLLAPSGVVYRLLVVPPDARSGDLKLSLAVLRRLRDLLNQGAAVLAPRPTGSTSLSDDPAQVAALIGELWGVDTPIPRSIGKGRLYPAPDIAAALADRGVAPDLTMAGAMDADIVWSHRRTDDADIWFVANQKDRAESVTLSLRGDGRDVSLWHADSGAVEPAPFRQEAGRTSVPLTLSPNQAIFIVQRGSAPATARDVATPVEAESLALSGVWTLFFPKGQAMPDSVPLPKLGLWNDMSDPAVRHFSGTATYATEVKLPAAWAGKPVWIDLGAVHEVATVRVNGTEAGIAWKQPYRIDVGPLLKAGTNKLEVAVSNLWPNRIVGDAGGAGGVRVTTNTHPLLHPDTKARLLPSGLAGPVRLVRMELPGGNG

SEQ ID NO: 1056 - protein, 892 aa, Solitalea canadensis
MKPIITNLMLLLFAGAASAQSSKELYRSKEFSIYTDKVVQGKYIAKVLSPTEMTSDYQSPVNLYKSPKLTFKFSINGKDNEMISGQDHSINVMAKDGKFISPLITFGKHYVDKKNVPDNTYLEPNIDFTIRLDMRNVLNAFKTDGFYKGADGKKVYKEDFKGVYVAGSTLPLIWDFDNLVHHPDLQLKDDDGDGIYEVKVVLNEFKEQPSVSSNWKLKRNISAFPQYQASSPIENAMYNLSLDEMENAIEADSTLRTGKEWAGVWTRDVSYSIILSMAILQPKVAEYSLLRKVKNDRIIQDTGTGGAYPVSTDRMIWAVAAWEIYKTTGDKNWLSKAYSIIKNSIEDDWKNAYDPKTGLVKGESSFLDWREQEYPKWMQPADIYESECLGTNVVHFQANKVFAEMAILLGQKTVSDEHNAIAQTIKTGINNYLWIANKGYYGQYLYGRNYKILSPRSEALGEALAVIFGVADNERQKTIVRNTPVNSFGIPCFYPQLPNTPPYHNNAVWPFVQTYWALAAANAGNEQSVMESIAAIYRPAALFLTNKENFVADNGDFAGTQINSSNMLWSLSGNIALVYKVLFGMQFGADRLTFKPTVPQALAGTRMLTNFKYRNALLTISMQGFGTQIKSITMDGKPLVNAIVPASLTGKHTIKMVLTNMMESSSTTILPAYTSLTIPQVELKNDEIVWKKVPNAVSYVFIKNGDRIDNGIDTACIINNNSFAEYQVIAVDKNGVESFGSEPLQIIPEQTVKTIEIENLTSKADLPYKGYSGDGFVEISTQKNTILSFETTITEAGTYAINFKYANGNGPINTENKCAFRTLKLNNKQVGTVVLPQRGTNEWSEWGMSNSVIVELKAGTNKFDLTYETNNANMNGTVNQAMLDYVRIVKVE

SEQ ID NO: 1057 - protein, 1025 aa, Parabacteroides goldsteinii
MKVDITKIFTILFVIAFAGCLLQSCNSSINGLEQGFFNPPDSVRPGVYWYFMDGNLSKEAMTKDLESMKEAGIGHVVYLEVNVGVPRGSVDFLSDEWQEMFAHAVAECERLGIDITLGVGPGWTGSGGPWVEGAQSMMHLVSSSVNVSGKGKKTIALPKPSPKPHFFAEDNFTPESKKRWEEYYEDVAVLAFPAGASTFGTDYEAGSAYLRITGIEEKALYYRKPYSSVTQVKPYLTFGKDSFTVQTVDKDCIIDLTDHLEIDGTLTWEVPEGDWTIMRFGARNNGAVTRPAPHPGVGLETNKFDTTALNAHLDKFVTKLFNRVGFKKAQPQGGLQMLHMDSWEMGAQNWTTHFREEFTKRRGYDPQPFYPVYAGFIVQSREESERFLWDLRVTSQELIKEYHAGHIKSYGKRYGLGLSIEPYDMNPTADLELASVADMPMCEFWSVGYGYNTSFSAMEGTSVAHLLGQPVVPAESFTAYLDGWRQHPGSMKNQTDWALASGINRLMFHTFQHQPLNDRLRPGMTMGPYGVHWDRNQTWWPMADAYHRYISRCQLLLQQGRTVADILYLTPEGAPHVFRAPISALEGDLLDTDNLFNFRNETPLPDRKGYNFDACPPSLFYDAQVKDGKVVFPSGVSYRLLVLPCFETMTPELLEKIRDLVNGGATVVGLPPQKSPSLVNYPVCDEKVRVLVQELWGGYEIPETVEIRSIGKGKVIWSKELLEQQDNLYPTYEYTADILAKMDVHEDFESTGEIRYTHRTMKGYEIYFVSNRKDSPVTVNCKFRMTGHPELWNPMTGEIRPLAEYTVTGVHTTIPLLFDANEGYFIVFRDNTFQREIQTKKNFPDSRRVASLTAPWSVSFDPAWGGPEQVTFEKLTDWTQHPDSGIRYYSGTAIYRQTFDRPADNSKQQFLDLGKVKNLARVRLNGQDLGVVWTAPWRVEITKALKLKDNQLEIEVVNLWPNRLIGDEQLPDDGIRNGEWPEWLKDGGPRTSGRYTFTTYKHFTKESPLLESGLLGPVTIWGIDN

SEQ ID NO: 1058 - protein, 989 aa, Cyclobacterium marinum
MKLTTYYFCLIAGLCSLFTFGLHAQESAIYKQMRQNFQQPPNTAKPTVYHWWLGGDVDTVRLKEEILSFDKAGIAGFTIFEIGSRDTVFVGAGPEFLGEASLETIKVAVEEAGKYGMEVGLNTASSWNAGGNWLTPKHAAKSIYQRKVNVSGGGKEKIKLPFPDIPEKDPRGRKRLISYGKDGKPVYSEEIAVLAIPLVGENAAIDTSLIKDVSIYFDANKEVLNWDVPEGDWKIVRYVSSNSGENLVLPSKYSAGPIVDHFDADATAFHFNYIIDRLESKLGDLRKTSLKNLYMASYEARGFNWTPTLPQEFQELNGYDIKKFLPILFGEVSLSQEATAAFRAGFQRTLSELMIKNFYMKSKEICNAHGLKNNSEAGGPGYPLHDVPVEPLKALGKGLDIPRGEFWINHHNFSEEGMDVLRVVKEVSSASNIYGVGMVEMEAFTTFQQWQEGPYEMKPMGDRAFAEGMNRVVVHGSTHNPKGTGNPGIVYHAGTHYNDKRVWWKKVRPFNDYLARISYVLQEADFQSDVLYYYGDTIPNYGGHKRSRFNPGEGYDFELLNTEILFGLEVKNGKIINPRNGAEFKVLALTKEHEINPKVLSKLEQMASSGAIITGPKPNRIAPERNMKELPNMNGWLDNLWKPFSKQSFKPGSKAIYYNVSVGEILKALELSPDFSYKGNGFYTLDYTHYQKGDMDFYFIVNTTGEWLSRDLIFRQEGKVPELWNPENGNISPIPIYKETEEGISLPLSLAPHESAFVVFKPGIKPVHFTKIAHGGIHPPKVRYSDQGIEFWEEGEFGLGHGEDTLILNNFPNVKSLEGAWEIYFPEGWGAPDKAIFPELKSWTESENEGIKYFSGTARYEKKFIHEMHASEYPEAKIYLDLGDLSHVAEVWLNDKPLGITWSKPYRFDVTEAIKPGINTLKIEVANTWSNRLTGDAITGKDYTQTHVNNTVIKGMPNFRVTWENAPLIPSGILGPVTLTTVLPIAMPK

SEQ ID NO: 1059 - protein, 872 aa, Solibacter usitatus
MVEMSVPVLRSSAFIALLAGLALGADPANITELQRGFQHPPDEARIMVRWWWFGPAVTKPELEREMRLMKQGGIGGFEVQPTYALELDNAEKGIKNLPYMSPEFLEALRFTGEKAKELGLRMDLTLGSGWPFGGPHIPVELASPRLRVARAAVTAGAAAINVPELQPSEKLIAAFLGNQELEAAGSQSFRLPPSAAGQVTFFISSHTRQTVKRPAVGAEGWVLNHYDRAAIEQHFKSVGEPMLNALAKTPPAAIFSDSLEVYNSDWTGDFLAQFAKRRGYDLKPYLPALAGDIGEKTGAIRNDWGQTLSELAEENYLKPLTAWAHQHNTKFRSQTYGIPPVTLSSYSLVDLPEGEGTQWRHFSSTRWATSASHLYNRPVTSSETWTWLHSPVFRATPLDMKAEADLHFLQGVNQLVAHGWPYSPPSVGEPGWRFYAAAVFNEHNPWWIVMPDIATYMQRVSWMLRQGKPVNDVAVYLPTHDAFAGFTLGRDSVNQAMEGILGPKLVPTILDAGYGFDFIDDGAIAAGGVPHKILIVPGAERIPLATYQKIEEYRRDGGKVFFTKRLPSLAPGLREEGDTAKIRELSAKHVVTGDDGLAGALHDALPADFTAPPEIGVVHRKLAYADVYFLANTSNHAVKGAAKFRASGMPAAWWDPVTGKSSKADLNLELAPYESRVLVFSRAGGAVMGQAMSLPEVDISSDWTITFPGEQPVKMATLRPWTDEENRKFYSGTATYERKVTATPAMAAAHVFLNFGEGTVADPASERRAPSGMRAWLESPVREAAQVFVNGKPAGAVWKAPYEVDVTGLLQAGENSIRVVVANLALNVLAKGPLPDYKELTAKYGEKFQAQDMQSVRALPGGMMGPVKLVSK

SEQ ID NO: 1060 - protein, 806 aa, Lunatimonas lonarensis
MTKTFKIGFLLLACVVFVSCSENPKQADCGLCESVGAKWIQVEKELPTEDSLFYLPNPAPLFRKEFGVESHFDSAKLFITAAGYYKATLNGEAIGKNILDPAWTDYTKRVYYAEYDLSAQIQEGTNCFGVSLGNGFYNPLPMRKWGRRNPREDLNVGKPTFIARLVLYYPNGKTKEISTDESWKYSYGPLIKNSVYLGVLYDKGMEIPGWDRPGFNDTGWKSVQVGKGPGGQLQAAFFPAVQVTEEIRPKSIHEIEKDVYIVDMGVNFTGTYKIRLAGNVGDTVTLRFGERLYEDGTLNPMTTVVGQIKAPGIGGPGSPAIAWQTSSYVVDTEPTWFSPDFTYHTFRYMEITGLQKPPLLTDITGLYFHTNVERESHFTSSNSLLNQIQDATTRTFLSNLISVQSDCAVREKFGYGGDLNATAESFIYNFDMRDIYRKTVYDWVDAINDSIFVDTAPFAGIKYCGISWESAYLITQYYLYLYYDETDLVHELYEDNLAWMDKVARIHPEGMVDSGLSDHESLEPVPVQLTGTAHYLQCAEIMETFASLKGDTKNQQRFAELSEKLRAIIKAEFWDKPVTERINRQTLFSTLLFHRIIPEDELGAARDSLVQAVKNGPSGQFNTGIFGTKYVLETLSESVPIDQVYAIVNSTKFPGWGHMISRGATTIWETWQESDNVFTNCHPMFGTVTEWYYRWLGGIRPDPKQPGFKAFVLAPRTPTGLDSISCSYRSPYGDIVSNWRRESGNSVVYDLIIPVGSVASVSLDMKAAQGLSITKDGKAFQPPVTDASTPGEFKLEGGNYKVVVSG

SEQ ID NO: 1061 - protein, 773 aa, Rhizobium leguminosarum
MNFQPAAISGNLVSRTWSGDMIAPLSDGGQGTAASFVSKTFEHDGTKLPAELFISALGLYRCFINGVRVGSDLLTPGWTNYDDRLAYQRYDVSNLLKPGLNRIEIWLADGWYRSPLMWGAQAIPNCWGDRIGAIADLIGADGTVLSTDTTWRSGVLPILRSGIYFGEIYDARQENCVETHGTEKLAFDKALLVAHETAAVRELRPLTAVENWTDDEGRTIYDFGQNAGGYIRYTVRGTAGAEVRVEHSEVLGPDRHFDNRNYRTAAAHTVYTLRGNGDETYAPHFTFHGFRYARVTIKGDAKILAIASIPISSVPEPAGGFTSGNALVNRLVENTIWSQRANFVEVPTDCPQRDERLGWTGDAQVFAATACWLSDSQSFLRKYLRDVMADQREDGAVSHFSPDPTRLHPANFPGYAGSTGWGDAIVVIPWVLYTHYGDRAVLSECLESMVRWVDFVWSISDGPLVRPPSRWGDRGFTFGDWLQPVGDNRKPRPTIADDCAATLYHFISTDLLARIAATLGEHALEEKMKQRANEIRRAFTNEFITPAGRLAHNDQTSYALAFLHDLIPAEHRQAAQQHFRQVIIDADYKIGTGFIGTPALLPALTKLGMDDLAEKVFLQEDVPGWLYQVSKGATTIWERWDSMAPDGTIYEPDMNSYNHYAYGAVCQWLFESVAGISPSPSAPGFAEVIVDPAPIPSLSPVSAYHDISQGRIEAGWHCDGKKVTYVLTLPEGCIGWFRPGKRHQNPSLNGEPVVEEAVLAPGTHRLVFSLPNS

SEQ ID NO: 1062 - protein, 868 aa, Streptosporangium roseum
MIGNAVHCAPAQTSPSRSDPAPPRLTPYGLRCEHRQTPLGVGEPRPLLSWRLASARAGDDPVAYELEVGDWSSGRVEDPAAIGAVYGGPPLLPRTRYAWRVTVWARDGAEGSAESWFETGQDVWQASWIAHDPAAVAHMDPPTEGDQALSHHGLLPCPQLRTSFESTAGVTRARLLISAKGLYEARVNGHRAGDAELAPGWTDYRRRIQYQVHDVTPFLLDGENVLAATVADGWWSGFTGFDPRRPGYHYGRFPELIAELHLTFEDGSTRVVATGEGWRTGHGRVRYGDLLKGECHDARAETPGWDLPGFDDSSWRPAVVTGDDHSLLVASRDEPVRALGELLPVSSVLVRPGVHLVDFGQNIAGRVRLAVRDQEPGRRVTVRHGETLDGEDRLHTANLRTADATDVLITAGGAEEVFEPRFTYHGFRYAEVSGIDRLDDIRAIVLHSDTPWTGTFECSDPEINRLHDNIGWGQRGNFVSVPTDCPQRDERLGWLADAQVFLPTACFNADVSGFFSKWMRDVVDAQSPEGGFSNVAPLLSGVADEGAPGWADAGVLVPWHLYRVYGDDRFLDVDSMVRWVDFVARHNPDLIWRHRTGPHFADWLAPGPATPREVLATAFFHRSAALTAEAARVRGLYGEAERMGALADRVRAAFAAAFVGDGGLVEGDTQTGYLLALAFGLLTPEQGRGAAARLAALVEESGPLTGFLGVNLLCPVLSAHGRDDLAHALLRRTDPPSWLYQVRHGATTVWERWDGVGAASMNSFNHYAFGSIGEWLYSGVAGIAQAPGSVAFREVVIRPLPGDLSRAGASYESARGLISVSWHNDAEGFRLQTRIPPGATATVHLPGGETRRVTSGDHIFELVRGEKA

SEQ ID NO: 1063 - protein, 869 aa, Parabacteroides distasonis
MNNKINDATMRIKQSIYIYAFAALLLGGCKSNNELTIPTNLRTEYLTEPIGLDTSSPRFTWEYSGNEEGFKASRYEVRIGTSPDDLRPYAEGMALKPHTRYYWNVTVWDGEGRPCATSETASFETAKFDPSDWSASWITDHKDKEFEPAPLFRKSFPVGKEVKDARVYVASAGYHELFINGERVGTNYLDPGYTHFDKRILYVTHDVTSLLKQGDNAVAAVLGNGWYNEQSVAVWNFHEARWRDRPRLLCELRITYTDGTTEVIGSDETWKTSTGAYTYNNIYSGDKFDARLEEAGWKTAHFDDSKWEAALPAQAPAPLLVAQQMPGIRITEEVRPVSMKRFSDQLYVYSFPKNMSGLCRLKVKGEAGTRITLKHGELLKKDGRLEQGNINVYYHPVKPDEVFQMDVFTLKGTGEEEIFMPSFSYHGFQYVEVESSRPVTLTEENLTGLFMHTDVRPSGSFACSNPLLNKIWEATMQAYRSNLHSIPTDCPQREKNGWTADAHIAIDLGLLGFDGITLYEKWMDDIIDNQREAGEISGIIPSSGWGYGEWPGPVWDAVMFIIPNALYDYYGESRSIERLYPTMLRYLDYLKTKEKDGYLPFGLGDWVYWKATTNNEYTSTAYYYLDYKLMARFASLLGKDAAPYQEKANTLKSLINQKFFNAETGVYAEGTQTAQALALYLGLVPEGKEQLVADKLREVVAGNNYFLDFGLLGSKTVPAMLTKYGYIEDAMKMITKTEAPSWGYWVETMGYSTLPETWTLSPKFADASLNHVFMGDVSAWMMNQLAGINHDDSAPGFRHIRITPHFVKELDWAKGEYHSVRGRIASEWKREGDKVMLTVTIPADCSADIVVGDQTETVSAGTHTFTYPA

SEQ ID NO: 1064 - protein, 938 aa, Unknown
  Lachnospiraceae bacterium
MEIYNLKINGMVNPIGFEYKEIICSWKVRKTEDKQQKKARISISADQEFHEIVFQIEGEELDSTGTLADFKIKPYTTYYWKVYVEGENGEYGTSETAFFETAKMCHKWKADWIGTDKEDTFHPVFQKKFYLRDGIKKARLYCCGLGVYEGYINGKKAGNDYLAPFINDYKDNLQYQTYDITDLLFQQKENKIEFLLGKGWYIGKFGLDGCEKIFGDEMMLIAEIRVEYFDGRIEVICTDDNWKYKGSDIEDSGIYFGEKINRQLWDDRQNLWKQAVKKKQKTPLKERYSLPLTVKEDIVPVKIIHTPIGETVLDVGQNMVGYMEFFADFPKGTRIKIECGEILQHGNFCHDNYTIAESTFEYISDGRKETVRPHFTYMGFRYLRVTGWPNEIKLGDIKCRVIYSDLQRTGFCKTQNSMLNQLYENCIWSQKSNFVDMPTDCPQRGERLGWTGDAQVFAATACYNMDTRAFYRKYLRDIRSHQLRKNGAIPNFIPDLGTFSEACSIWGDAATILPYQIYQSYGCAEEIRSYYTTMKDWVEYMVSMDESQGRHYKFQPGFQFGDWLALDGITEQSLKGSTDDNYIGCCYYYHSVKITSEIAQVLGYTEDAQRYQELSGKIRKAILNEYFTPKGRLSVDTQTAYIIALKFGLYNNKNVLIQQFKERLTRDCYKIKCGFAGTPLLCSVLGENGMEDIAYRILLNKDYPGWLYCVNLGATTVWERWNSVLSDGMLSGTGMNSLNHYAYGSVVQYFYEYIAGIRPKRPGFKEAFIEPKPDIRIQGVMCSYDSAMGVYKSEWKIQENGLICIHIEIPFNCTADVLLPEYSSNGLTYSDNVNGEMISENGKLQLCSGKYDFAYFPKNDYRHVYKPESILGDLREDKEALEILEKNIPVLYEIIQSNDIENMLITLQEFDTLHFMGIDPEIADETRKKIYNLNYYGK

SEQ ID NO: 1065 - protein, 774 aa, Chitinophaga pinensis
MRIILTAAFLLITSIVSAQYNAWKGSWITNTEDTTATKAPYLRKTFTLDKKVVSATAYVAGVGYHIVFVNGKPVTDAVLEQAYTRYDKRLLYKVYDVTALLSRKGTQSIAAELGNGWYNIQSHAVWGFQNAPWRKTPRLLLDLVIRYDDGTTETIATDNSWKCATGPSQFNCLYSGEIYDARQEVAGWNQTAFNDAGWKQVLLTSSPGGALHEQIMPSIKVIRRIKPVSMKNLGNGKYLFDMGQNFAGVATLNVKGQAGTKVTMYYGEVLKNGELDMVHNTEHMRSMPGELRFQTDVYFLKGGAREVFTPRFVYHGFQYVQIETDQPLELNVHSLEGLFYSTAFEEAGHFTSSDPMINKLYEAARQSYRSNFLSIPTDCPQREKNGWTADAHISTEIGLWNYQTTEGYRKWLHDVRDAQLPSGAMPGIAPSNGWGYDRPGNEEFTFGPAWGSALGFVTWYMYLYHNDTALVREHYDAFKKYTDAVAKGAEGYLFKHGLDDWMSLVKTPMPLTSTAYFYTDAELVAKMARVLGNKADEQTYSRLADSIRAAFNRTYFDANTGVYKDSTMTALSAAVFHGLASPEAAAKTAAQLSSKVQRSNYHADFGVMGTKYVLPTLSDYGYADVAFRMLTDTGYAGWAHWIANGATTLFEDWPGELSHNHIFFGDYCAWYYKTLAGIRPDEAAPGFQHFYIQPAFVKALNFVKADYASSAGMIKVEWKRKGNSIKLSVEIPSRATVRLPAGMTDDKNATRITLNGQQFDQVVLTPGKYTFNLK

SEQ ID NO: 1066 - protein, 1044 aa, Caulobacter segnis
MQIDRRRVMLLGGAGSLVVAQGEAAPLGAAAISDCRVCGLETPLALGAATPRFSWRLSGPRPQAAYRITVARSAADLSAPRDLVWDSGKVASGQSFDIAFGGPAAAPRQVFWWRVEAWDDKGARAVGRPARWETGLLSASDWNAAWLAAEDATAKADRLAGVHWISGPESITDKTSKRCYRTSFEVPAQSDGTLFLAASGLAGVFLNGQELAAGEEEPTRFTTMSPYPLALRQGRNVIAIAQTPSRDLGGPQPMLCALIRLGGSERRLSTAEGWKTTVNAPEGWTLPDFDDGAWPAATTARNRPRGQPLPPGAATHLRRAFRLDKPVAQARLYATALGAYEAWINGAPADERKMAPEPTNLLERVLYQAYDVTAALRAGDNVLGLWVGDGWYASEFSANARFCFGPAPCRAMAQLEILFIDGSRQVIATDDQWRIAPSAILTSEIYDGEVYDARQEIKDWALPGTPQGGWRPAETVEAPNLPIDPQVSPPIRVTQRLKPKAVTSPKPGVHVFDFGQNFAGWAELAISGKAGTRIELLFGEYLKPDGQVDQANLRTAFARDTYVLKGQGREVWSPRFTYHGFRYVEVRGLANAPAADLLTGLVGHNDIRVSGVLRVGAPVVEQFWRNSVWSQRSNFFGLPTDCPQRDERLGWLGDAAVFWPAAAYNMDVEAFTRRFMGDVRRAQRPDGQFPDCIPPFMVPSSRSAPGWSDAGVILPYTAWRQYGDTGVIAENWEAMERYLAFILAKNPDYLWKSSKGNDYGDWLAVDAKYLGEATTPKDLIGTAFWAADAAMMRDMAKAIGKAEAAERYRALFEAIRAAFAGAYVQADGKIGNGSQTSYILAIRFGLLSPEQASEAGRRLAADIAARGGKLSTGFLGTPHILDALADTGHEATAVGLLLQRDYPSWGYMVTKGATTMWERWNSDTGDLSMNSYNHYAFGAIGDFLFRRIAGLAAVEPGFAKVVIAPIFDRRLGSAGADYDSVSGRLSSNWRYEGDTVRLDLSIPPGVQAEVVIPTAARAVRVDGRPVPSARFRVERGQHRVVFTA

SEQ ID NO: 1067 - protein, 734 aa, Pedobacter heparinus
MKLIPNFLKTSMQQTVLLLLLALVCCADTVLAQQSGKASWIWYPGDLDIWVSNKMQNRRTERGAFLPPFWKMDSHYVLVEFHKEFNLANAEEVNLYVEGQYNVKIDGQAFSGYPKKITVPAGKHKLSLKVYGQDKVPAILVQGKTVVSDESWLATFEDKEWIDASGKASDKSGTTFVSAASWNLTDPLSPPSRFKLATTPMAAVKTDKVNNGFVADFGKETFGFIKLHGLKGKGKLHIYYGESKEEALSADHCETLDLLEIDLKGKQDSVIELSKAFRYVNCQPEGNVTLDKVSMLYEYAPVTEKGNFRCSDEQINKIYDISKYTFHLNTREFFIDGIKRDRWVWSGDAYQSYLMNYYSFNESPIVKRTLLAQRGKDPVTAHINTIMDYSFYWFLGIYDYYQYSGDQKFVQDIYPRMKSLMDYVLGRRNKDGLLEWMPGDWIFIDWADKLSKDGEVSFEQLLFCRSLETMALCADMAKDTEAAANYKKLAADLKARIFKLYWDENKHALVHSRINGKPTDNVTRYANMFGIFFDYFSPSQKQEVKQHVLMNNKINKITTPYMRFYELEALCAMGEQSYVLKQMKDYWGGMLELGATSFWEEYNRDKKGVEHLAMYGRPFGKSLCHAWGASPIYLLGKYYLGVKPLSAGYETYVVEPSLGGLEWMEGKVPTPSGEISLYCSKKEIRIKADEGSGVLRFKSVSKPVVKGGKVVEVGKRTYELKLMKGVQYTVNYQK

SEQ ID NO: 1068 - protein, 770 aa, Pedobacter heparinus
MINQIFKFSFFALNLLAWYSFTAKSQDLKVFDKATSWITCDKAQDQSNSWIAFRKVVQLDEKPVKALLDISVDSKYWLYINEKLVVFEGGLKRGPNPDDTYYDEADLTEYLKAGTNTIAVLLWYFGKNGFSHHSSGRAGMFFQLDMDKQGKICSDRSWKCSVVPAYLNVYSGDQPNYRLAESNVIYDARLALGDWTSASYNDKTWRNPFVVGPAGCMPWNKLVKRPIPQWKDYGIVNFNLNFPFNATGDTIKVKLPYNAQFTPYLKVEATAGKTIEMFTDNYSGGSENNVRAEYITKTGIQEYESFGWMNGHVMMFVIPKGAKVLSLGYRETGYHTTFAGSFNCNDAFYNKLWEKSSRTLYVNMRDSYMDCPDRERAQWWGDEVTEMTQSFYALDPDANLLAKKGIDELTGWQRSDGVLFSPIPAGNFDLELPVQMLTSVGYYGFWTYYYYTGDLETIRAAYPSIRKYLSLWEMDKNGLVISRTGGWNWGDWGKNVDIDLMSNAWYYLACKGYLEMSKTLNHAEEIKWAENQMSVMKKSFDTRFWTGKAYRSPDYKGQTDDRSNALAVLAGLTAPAKYPLLKDVFLTEEHSSPYMEKYVLEALFKMGYADIALERLKKRYTAMVDSELTTLWEGWKIGVNGYGGGSYNHAWSGGGLILLSRFVAGIEPASPGYETVKIAPQMGSLINCSATVSSVAGLIAVKNTFTNEKEFNQLIESPSPLKIYFPFEVYRIKKIRVNNKKLSEALMLKFKNEGKLELSKGKYKLTVNIN

SEQ ID NO: 1069 - protein, 819 aa, Unknown
  Deltaproteobacteria bacterium
MSLHDRSWVWNPDWNESRKETSAGGFVHFRREIDLEKRPSRPIFISITADTRYKLYINSKFVHHGPVKGDSQVWYYDELDIQPYMKAGKNTIAVRVLRLYHGTRFGTSFPRMPLGGLRIQHIRDSNDPPIIFSIETNGSWKTAVDRSSFLPIIEDDMFLHIFEAVDRRNDCKLQWTSAKPHKIFNAFGLVSPWKLSPRQIPFANFRPAIFSTIHNIRSTSNDAEVVDWQACLLAKSSNRTPVRLAAGTIHHVELEASHHLTAFMSFLFERPENPGAEIKITYSECYEDVPDNPQFRQKADRRDTSKKLLGPYDTFILGGRIYEQEDPSSAYHESGEDMVIFAPFHFRTFRFIAIDIAVNSDSDLIFHGVQITRTKYPLDVLAQFSPGGRDVTLPVQKMWETSILTLENCMHDCYEDCPFYEQLQYAMDTRSSALFTYYLSGDDRLARQAITQTRNSFQPSIGLTASRAPCEHLQIIPNFSLFWICMVADHYLHYGDMAFTSQFLPVCDAVLDSFRRRIDPDLGLVRCYDTDDFWDFVDWTEAWKPRGIPPAGKRTGYQTFSSSLYAYTLNLIAPAVEEYGRKGVAEEYRQSAAEVAASIWQHCFDGQYFTDGLAGSALNSEYSQHNQVWAILSGAVIGDEARQLLSKTLSRHDLTTPSIAMSFYTLQAVSLVGGDLYDLHFNDFWAPWIEQLSNNVTTWVEDNVSQRSECHAWGSAPIYEFMAEVVGLRPLEPGWRSISFKPRLALFETMDSKVPIPIRGSSGMAVAHVRWGRKGDDIAGVTIELKKGAENLRIPITLSHESGEDEVVISPFARDVRIQ

SEQ ID NO: 1070 - protein, 796 aa, Thermobaculum terrenum
MRKIIAQDPFTRNDPGIPWDQRGQWPASWVAARRLPSPPYVVAYRLAFVLPQAATATLHVTADERYELFLDSERVGRGSERGDADHWFYETYELELPAGPHTLVARVWSLGPLAPYAQLSVRHGFLLAAEPPLTEALSTGIAPWEAKRLEGYSWVNPSPAWGTGGNIALSAAQFPWGVERGEGDGWEPVEVVERAVGRLMALEAPPQHLLRPATLPAMLEVPIRVGRVRHVSAPSSEEVSSLPIRAEQALDEPEWQAMLEGRSSVTVPPHTTRRVIIDLEDYYCAYPELVTSGGEGGAVRLHWAESLYEDGRGRHKGDRDAIEGKYFRGVGDVFLPDGGDSRRFDTLWWQAGRYLELLVRTADSPLTVASLRLRETRYPLEMESAIATGDPDLDATIPLMVRAMQMCSHETYMDCPYYEQLMYAGDTRLEALVTYVMTRDDRLPRKALRMFDASRLASGLTQARYPSRVRQIIAPFALWWVAMVCDYAYWRPGTEYVRELMPGVRATMEAFERWRGSDGLLESPEGWNVTDWVPEWPAGIPPEGEWGRSGLLNWHLALVTRMVADLERALGNPQMAEHFGARAREIADAALRAFWVPSRGLMADDTACQRFSEHTQCLAILSGLLPPAIEEQVGRSLLEARDIARTTIYFSHYLFEACRKLGRVDVLLARLGLWRELVDKGLRTTIEAPEPTRSDCHAWGAHPLYHLFATFLGIRPAGLGFSAVEIAPQPAALRRLEGRLVHPRGDVWVAMEVDEEQIRARVRLPEAVPGVFCWGSRRVPLRPGEETDVVLPRAQG

SEQ ID NO: 1071 - protein, 839 aa, Opitutus terrae
MKRMKIMKRRIDIFRSSLFLGAYPAMAAPFVQRSAWIWSAEGTHAAPAPESASPSHYQVRLFRRVFLLENGGREGRIAVSADSRYVLYCNGALIGRGPARGDVHHQFYDTYELAPYLHRGANVLAALVLDMSHVAHRPAALGAPGGVMTYAGGFLLEGGVVDLNDRMEILDTGAAGWKVTVDRSYRFQNDGTRFEGYHGYFEHRVSAEAPADWTAASFDDSAWPDATVLYRAERLENRRDPASPYGLVARMIPPMEVGRVARFAAGVLPGGGKPGAEWKRLAAGKGAVTIPARSTVRIILDAGRMTTAYPLVQTDGGPGAHIRLTYAEALRLPWSTVGARMLGRPQSLANLASHFADESSGWTFDARGHVTGWSDRWEPAGRPREVFEPWHWRSFRFVELEIVTAEEPMELTDLGYRFTAYPYRVEAEFACSDPRLERIWQTALHTMRLCSHETFVDCPHYEQMQYAGDTMITSKLAMLSTGDYALSRQALLQFDWSRIPDGLTQSRYPSRLLQVIPSWSLHWITSIRDYACCSGDLQTVNEVLPGVRVVLDWYRRHADPSGLPSRLPYWNITDWCSWWPRGVVPGADEGPTCIISAQFVQALAEAADLHGWVGQRHEQRRLATEVKTLRGVLRRRFWSRDEGLFFDKPGGPEVSQYGNAWAIVCGAATAADRKRMLARFPADPLLAPGSFFCWHAVFRALEAAGAYDRLPEFLGPWHEMVEAGLDTFVEENSYWRSLCHAWSAHPALEFLAGVLGVKALEPGFATVRVTPHRCGLREARGQVCTPRGPITVAWTWEKGRFRIRVTAPRELQVEIGLPDGSDHRMTHGRFETEVVIHEA

SEQ ID NO: 1072 - protein, 881 aa, Kribbella flavida
MAEPVAPDGWTSGGPLAVAKLTAEYAEEPHGTDEVRPRLAWIATAPGYGATQSAYQVLVASQPELLSPEQADVWDSGQVGSDAVQVAYDGPALAARTRYHWAVRLWDGQGRAGRWSRPSWFETALLDEGFGAARWIGASTEAAPLLRRPFELTGPVRRARLYASGLAYAVLRVNGQQVGDAVLDPGFTNYDRTVLYVTHDVTELLQAGENVLGAELGRGFFGMTTPNVWRWHQAPWTGDPRLLARLVIDHEDGTTTELVSDGSWRVTSGPTVSDSLYAGERYDARLAQPGWDAPGFDDAAWSPAVELTAPQGTLRAQAHEPIRVVEEVAPVAISSPRAGVQVIDFGRTTAGWAKLRVEAPAGSRFTLVYGETLTADGQVEATNRHVDGDRFQQDEYVAAGHEIEQWEPRFSYKGFRYLQVTGDAEAEVVLKVVHSDVRAASRFDSDVEVYSWLEQAMRRTVLNNLHGIPTDTPIFEKNGWTGDAQVGAPTMASLVDLARFFTKWLDDLRDSQLPDGRLPVIVPSAGWGYAELAPATEWSTVYPFLLREMHRWYGDTRVLADHWDAVLRYLDWELERVEDGLSISVLGDWLPPGYPDGPPPEDSRLTATAYLHRAVTAVVEIGELIGETSELERLRKAAAELADGLNREFLDREAGLYRTAADPDYRQTSNAVPLAFGLVPEDQVPRVVANLVADVQARDFHLNTGCLGVGVLLPVLTQYGHADVAAKLAQQRTYPSWGYWLEEGADTLWEMWEADTRSRNHYFHGTVVQWLLESVAGLRNVGNGWQRIVVRPDARTGSTSAALRTDTVRGRVAASWRLVGRVLQLEVQVPVGCVAEVHVPSEAAADVTAVPSPYAGEPTRSDGYTVYTVPSGQWHFTSRTA

SEQ ID NO: 1073 - protein, 1021 aa, Streptomyces scabiei
MSHERATAEGTSAAARTAHRPHESPVHGLTVEHRTDPLGVDADRPRFGWRTRSASRGWRQGSYQILVATSPELLTPASADVWDSGRVRSADSVAVRYAGVPLRASTRYHWTVRVWNTEGRAAGTASPAVFETGLMSTDGVGGWDGARWIGMKGKVPGSPGAPLLRTRETLGCGDGRTVGDARLYISALGVYEAHVNGERVTVRQDGERTLELLPPGWTNYDARVDYLTYDVTVLLADGPEVTLAVVLGNGWYNGRVSEGSTYHTQSGNALAVKAKLLIRYTDGTTRSVVTGTSGGWKATDTGPFRADDLYDGQTYDARRELPGWTAPGFDDTAWSDVEHIAFEDRYPGVRLRAYPGESARFVDRWDRRPQSVTVITGVTGQDGSPHGRGRVVVDPARTVTDPAKAATAQVTLAAGETAVFDLGQNMVGVPRYGVRGPAGARVEFRFAEILNDDSAGADGPEGSLYRANLRSAKATSTYILKGDPEGETHQDSLTFYGFRHVSVTASETVTVTGLTGRVATSAVRETGTVTTNDPHVDKLASNIRWGQRGNYLWVPTDCPQRDERLGWTGDTQVFAVTGLYNADAYTFLSHFQDTVVDSQAIYGADGAQYTGVAPGGRYNFPGGGSGWADCGVVLPWTLWQMTGDTTVVEDNWPSMVRYLDWIRRQTGDTYAGQGSLTGDWLAPQKTSAQLMSDAYYGYSAHLMARMARAIGRAEEAATYERLFGRIRQAFIARYLSTEGGRVTVRSGLGDASPIEPGSDPNEKTEDNSQSALLWVLKLGFYENEAQRRALVALLADDIRNDAAHKEAHPDSVRVRYPENTLSVGFLGVNILAPVLTDEGRADLAYELLHQDALPSWLFSVKNGATTVWERWNSWAEDAGFGPVGMNSFNHYAYGAIMEWMYAYMAGIARDPDAPGFKRFLLQPHLDPTGRITRVRATHESPYGEILSAWEVGSGGRRLAYDVAVPANSEATLRVPAVSADSVREGGTPLADVAGVRFLGHTEGVSSYLLPSGRYRLSADLR

SEQ ID NO: 1074 - protein, 1187 aa, Unknown
  Actinoplanes sp.
MKGSFAVLAAALLLMPVSAPTAAAEPAVTLDGAHWIWYPEGDPATSAPAATRYLRRAFTVAASDIATAQLVVTGDDTIDVWVNGVRLAGSPRAADSWKRAVRVDLAGSLHPGSNTVALAARNTGGPAGVLGRLHAGSVDLVTDGSWRAATGVPENWADPAFSDVAWTTAKDLGAYGGGPWGAGVALPDPAAASPVSVTDLTVNRQADPVGVDTPRFGWRLAAGTGGQMQGRYQLTVGSTAGAADVWDSGIVASTASRDIGYSGPALGANRTYFWRVRVWDAQGRPSAWSAGARFDTGIALTAAFVGAPPAGDLSGADWIWYPEGDPATSAPAATRYFRRTVTLATSTTLVVAGDDTADVWVDGTQISASPRVTDSWKTAATVTVPAGTRTIAIAASNTTVGPAGVIAKLGGIVTDGSWRSATAAPGGWQQPGFDDSGWLAAKVLAAYGSGPWGGQVLVPAAAPYLRKGFAVTRPVARARLFATALGLHDTYLNGARVGTERLAPGWTDYTKRVQYRGYDVTAALRLGDNALAAQIGHGWYSGNIGFAGSRRYGTQPWYAAQLIIEYTDGTSATVQTDGSWRTAPGNILGDDLYAGETQDARLIRSGWNTAGFDDSDWVPVTVQNGARPTLVPQVDPGVTVQQELRPVAVTQPKPGVFIADLGQNFTGWDRLRVSGPAGTTVTLRHGEILNADGTLYTANLRAAQATDRFTLAGTGTETFEPRFTVHGYRYVEITGFPGTPDADSLTGLAAWTGGAATGMFTSSDSTLNQVQRAILWGARSNLLSIPTDCPQRDERLGWTGDIAAFVATSTFNFDTYGLLAKFATDLTDAQHSDGAFTDVAPDVLGGAGKAGWGDAGVIVPYTVWQRFGDLAPADRNFAAMARWVDYLRSTAGADLIRNQDTYGDWLNVDDGTGNDLTSTAFFGWSARLVSRMAAATGRTAQAATYGTLADQIAAAFTGRFVHADNTVGTGSETGYVLALAFGLVPGDRVQAVADRLAAKVASRNGHLSVGFMGVENLLPVLADHGHADVAYRILQQPDYPGWGYMIARGATTIWERWDGIRPDGSLQDPGMNSFNHYGLGSVGDWLYREVGGVAPAAPGYAQVLLAPKPGGSLTSASAELTTTFGRVRSAWSRSGSAVTLQVVVATGTTATVRVPGTAVTSAPAEAVPVGGTSYVVGAGSYTFTSTL

SEQ ID NO: 1075 - protein, 1062 aa, Unknown
  Asticcacaulis sp.
MTRLNRRHFLAASGLAATVAPTMSRSKTLAKTALGVTDLRAEQSENLLGTQAREPRLSWRLTGTERGIMQAGYRLRAGSKPGTADLWDSGNIASDACFDIPYKGKPLNAMQRVWWTVEVRDAKGRTATSAPAWFETGLLAPGDWKAQWIVAEDALAEGDRKAGLQWIWSEKALDNRLHAFRLDFDVPANLASSEVLIAGKDWIRGVWANGEQLPTPDQLVPNWGTLVPVPAKLKPGKNSVCVLVQAETTGFFPVDGGAFAALIRLRLSDGTIKRLVSDTNWKVRPLPPEAWTTADFDASGWVRAQKSGADAQNDPRPAEPAMLLRKAFTPAKKVVNARLYATALGAYEARLNGQPVSTAKMAPEISVTKDHIYYQTYDVTKLIRAGDNALGVVMGDGFYASAFGWRLERYGFGPAPRRLLAQLRLDYADGTSEWIVTDDSWRIGQSPIVTSEIYDGEVFDARLKTDGWDKTGFNAARWPAVRLGQAPHTKIVAQTGPLLVPVSKRRGTITQPKPGIYVIDFGQNFAGWARLNVKGTSGHTVTLKFAEYLKADGEVDQANLRMAKCRDIYTLRGDAGGETFEPSFTYHGFRYVQVENFPGVPTPADIEGIVVTSYCRETGRMTFDDPIIQKFWQNSVWSQRSNFFMVPTDCPQRDERMGWMGDIQVFLDAATFNMECDPFIRRYLDEVRASQTAEGAFPIVCPQPESFPEVTTAGWSEAGVILPWTLWRRYGDTAVIDENWVAMTKWMDYLFKYNPDYVWRKERGLDLGDWLSVDAVKPDDETTPRILCATGYWAYCADLMTQMAAATGREAEAAKYREVRAKIGAAFAKEFVDKDGKAGNGSQTSQILALYFNLVPAERRAAAGEILAKEIRGRGMKLSTGFLGTPYLLDVLADTGHLEEVSGLLKQREKPSWGYMPLKGATTMWERWDGDTGDLAMNSYNHYAYGAVCGFMYRRLAGLAPAAPGFRKMTVEPIYLPHVGKVTANYESCLGTMAGAVTGNASGLKTYDLTVPPNAVAEVILPDGAWREGGKALTGHADIRALRRDSGKVRFEVGSGSYRFKI

SEQ ID NO: 1076 - protein, 1065 aa, Kribbella flavida
MSFRTRFGCLLAAVLLLTPLVPATGSPPATRETLQVRNLKTNNLTNPLGVPGTPPRLSWQLDGDRRGITQSRYQIRVASTPAKTARPDIWDSGVVRSTDSIEVPYGGPALTTGTAYHWTVRVWDDAGKASAWSPVATFETGPLRPGDWQGDWIGADNQPGPEWTDTTIDADVTLVKDALGVFFRGRGGVGYMWQLNQLTPDKPLLRPHVRQPGGGYVLLGEIPLAAGTDLKQRHHLRITVAGRTITTWLDGVQVDSRERSDHNAPGVVGFRTDGAEHGVVHSLKVTNVAGEVLVDTAFPAGDQTFPDGTVRAEGGLQVKGTTDLWLPGKPIPVFRKAISLPKAKKVASARIDAAAQGIYELTVNGRKAGDHQLAPGWTDYARRIQSQTYDVTKLLKSGANTLGAEVAPGWFTGNLAMFGPNKYGTDTAFIAQLRVTYTDGTADVFATDSSWQTAPGAVRVADLLNGESYDARRTASEWVPAQVRPSATAKIVPQTDQPVRVTQELKARAIPSPTPGAYLYDLGQNMVGIARLTLHGRPGQTVKIRYGEVLNPDGTLYTDNLRSAKATDHYTFATSRPETYQPRFTFHGFRYVEVSGLPTAPPASAIVGVVLGTDAEQVNEFRTNSPLVNQLHSNIVWGQRGNFLSIPTDTPARDERMGWTGDINVFARTAVYNLDSQAFLTKWLQDLRDTQRADGAYASVAPTVPNSFDGGMGNAGWADAGVNVPWTLWQAYGDTSVIRQHYASMTRYVDYLVASSNGLIRGGGDYGDWLNLDDPTPGELIGTSFVAKGARQLSQMAAAIGHTADAAKYQRVYEDVRAAFAARFVAADGKVGSDSQTGYILAFTSDLVPADRIAAAGEHFAATILRRDTHLSTGFLGVDGLLPVLTKIGRTDLAYRLLQNTSYPSWGYEIGKGATTIWERWNSINPDGTFNDVGMNSFNHYAYGAVGEWMYRTLAGLSAAEPGYRKALIAPTPGDGIDTAQLRHRTPYGEVGSQWRRLADGRFTLEVEVPANTTATVRLPAAEARQITESGRALSRAVGVSGVVDEGTTVALTVGSGNYRFAVRP

SEQ ID NO: 1077 - protein, 956 aa, Unknown
  Bacillus sp.
MAGRNWNASWIWGGQEESPRNEWRCFRGSFDAPASVEGPAMLHITADSRYVLFVNGEQVGRGPVRSWPKEQFYDSYDIGGQLRPGVRNTIAVLVLHFGVSNFYYLRGRGGLIAEIEADGRTLAATDAAWRTERLGGQRSNSPRMACQQGFGEVIDARELAEDWALPAFDDGGWAQARSIGPAGTAPWTSLVPRDIPFLTEEKLYPASIQSLSRVKAPKYAAALDLRNQMVPESVNHANPVSYCGYVATILTLETSGVVTLGFPTGVRGSGVWVDGVLQTEWTGVQPERYYSLNLAAGEHLVLVDITSSDHGGSSHFAIDSEAAFTLRSPAGDNGVPLATIGTFDQSEYIDHRPGRRMQTDHPDYRALPEAAPTAAALEAFASWVKPFEPSLYTEENVFGSNVWRTLAERRAVPRSVLNAILPVPEPGVLPVFEDGDCELVIDLGAERSGFIGFELEAPAGTIIDAYGVEYMREGYTQHTYGLDNTFRYICREGRQSYVSPVRRGFRYLFLTVRGNSAPVKLHEIYIRQSTYPVAEQGSFRCSDALLNATWEISRHTTRLCMEDTFVDCPSYEQVFWVGDSRNEALVNYYVFGETEIVERCLNLVPGSADETPLYLDQVPSAWSSVIPNWTFFWILACREYAAHTGNEAFAARIWPAVKHTLTHYLEHIDDSGLLNMAGWNLLDWAPIDQPNEGIVTHQNLFLVKALRDSRALAAAAGATEEADAFAARADLLAETINAVLWDEEKRAYIDCIHADGRRSDVYSMQTQVVAYLCGVAQGEREAVIEGYLSSPPPAFVQIGSPFMSFFYYEALEKAGRQTLMLDDIRRNYGQMLRYDATTCWEMYPNFAENRSNPDMLTRSHCHAWSAAPGYFLGSSILGVKRGADGWRTVDIAPQPCDLTWAEGVVPLPQGGHIAVSWEFVSAGKLKLRIEAPEDIEVNVTLPEGIEGEVTQVKYMS

SEQ ID NO: 1078 - protein, 1129 aa, Flavobacterium johnsoniae
MFQKKHLFFILLLASIVSAQEVHKKETNFQPTLESSKPWVYWYWMKSAYSKPGITADLEAMKQAGIAGAYLMTIKGPANPPLIDPPVLQLTPEFWDMIHWAFKEADRLGLKLAFHGADGFAVAGGPWITPEMSMQKIVWSTTEILGGKKVTSKLPVPAHYKDYYKNIATFAIPIKEYEITSQMQLPKVTTSNNTDASFLADPKKDENFKFADAGWIQYEFAQPFTCKSIVIETKGRDFQAQRLIVEVSDDGVNFRFHERMIAPRHGWQDMDFPNTHTITPVTAKYFRFVCDPKGTEPGAEDLDFAKWKQNLKVSKITLSNQSLINNYEGKSGAIWRLTPQTTEKEIPNSDAFKKSEIINISNFVDADGNLNWKAPKGKWKILRMGHTSTGHENATGGAGKGLEVDKFNPELIRFQLDHWFGEAVRSAGPELTSKVLEILHFDSWECGSQNWSSVFQTEFKKRRGYDLVEYLPVMAGIPVESADFSEKVLYDIRKTIADLVADNFYGTIAQIAKEYNVKLSAENVAPVVTSDALLHYKYVDYPSGEFWLKSPTHDKPFDMVDAISGGHIYGKDIIQAESFTALRMDWDEHPGNLKTTADRNYALGINRLFYHVFVHNPWTDRKPGMTLDDIGTFFQRDQTWWKPGKAWFDYCQRVQFQLQKGKPIIDLAVFSGEDFPSRSFVPDRLVPFIPNVFGKERLESEKIRLENEGQPTAKMPKEVTYSKNITDLSQWINPLNGYQYDSFNADVLINRAKVINGKISFEGGIEYGALFFPGSHKMAPNKMLSLASAEKILQLLKDGATIFVDEKPNLQPGVQSEADQKKWQNVIDEIWNNTNSATWKIGKGTVIKLPYLGNDFASIGISQDVYFTNLNRVDSETLAWAHRKSDTEDIYFISNQKAEKRTFDASFRILGKVPQWYNPVTDKTSALDNWKIENGRTIVSITLDANESGFVMFKEETKEILAKGRSSEFEKVQTLDENWKLQFDTEFKGPKEVVKINKLFDWSTSENDQIKYYSGTVVYKKEFIWKGKDSSKTWLDLGEISNIAEIKINGKDCGALWTFPFKTDISKALQKGKNTIEIKVTNTWANRLIGDQKLPKEERLTWTTAPFRLEGEPLLKAGLLGPVIIVKEK

SEQ ID NO: 1079 - protein, 1199 aa, Lunatimonas lonarensis
MSMIRILSLLFLWMLSFSLVAQSTFSLQKLKVDHQENPLGIETASPVFSWQMQVAGSERGVYQKAYRIQVSDSHGALIWDSQQVSSDRSVGIRYQGEKLRPITAYTWSLTVWNQSDHSQTEIGKFETGWMDSPNAWKNAEWIGGDSEDLVLYAHALAVFKAGVTIQLDQESKSTRAAFLLGGNDVRLMKKNLNILQMESGRDGSYVGFELDISQVNGTEEGLALLHAYRVGYHADDQVGTPFHSMPIPQRLIHEGNKYEPHDLFLECNLGIFQVYLNGTENENKISPNDPSKPSYVAQGLNLNPMGEGGNYINFPLLGDIGFKTDSGQLATFSNLTISNYRRPGNVLFSEAESTISIFDKHPNIRAIAGRYQVGTDNKAVLALEDPSRNAPPMLRTTFTTQAKKIKKARIYATARGIYEMYLNGKRVGQDYFNPGLTQYNKNHQYQIYEVTDALESNAANAWGAWLSEGWWSGHITFSGGNWNFFGDRQSFLGTLLIEYEDGTVQEINTQPQSWKLFTDGPILNGSFFQGEVYDANKESVLTGWSLAQFDDSSWKSAQNVPLEGTTYTGPMTNGTLDYKQLTLSAQNDPTPTIIRRLKAVSMEEVRPGVFVYDMGQNMVGVPKITLSHGHQGDTVILRFAEVKYPDLPAYHPHSGMIMMENIRAALTHDIYIRKGGDEVIQPRFTFHGYRYVEITGIKNAPPLNAVEGLVISSVDSIRSSYTTSNQDVNKLWENITWSMLGNFLSIPTDTPARNERMGWSGDINVFARTSTYLGEVLPFLKRHMMAMRDLQAANGKFADVTPVGNGFGGTLWGSAGIVLPWELFLQYGDTTILEENYEAMKAYLAFLETREDKDSGVQMEGPLGDWLSPEVNKNDNTQFFTAYQAYGYGILHQVAQILGKPTEAATFQAKFASRKKFLMDTYFDARTGKSIHSGVSTQGRGGSTAPGTQKGDPIDTQASYAIPLYLEVIDGDLQEKVLANLIATLARENVDDMGILRPAYSLMTGFIATAAINEAISRYGDPVHAYRLLQQTSYPSWLYSVKNGATTIWERLNSYTVEDGFGGNNSMNSFNHYSFGAVGAWMYMYSLGIQRHPEIPGFKKFRLQPQPDPDGKMTWAKGHYDSMYGRIHSEWKRGVDSWEYKATVPPNTSAVLVLPVKDLERVSEGGKMLTEVLGITLISRENGYITMELSSGSYTFSIE

SEQ ID NO: 1080 - protein, 704 aa, Eisenbergiella massiliensis
MANWIWYPGDFEIYHGMCQNFDREERGFFWPAYWHIADCRHHVVFHASCRLEKETAFRVTAKGIGHVLVKWEEKAPSWFPEGQPFYQEKKYTIGEWISCPAKEIGIDVVIGNRTGLPCIYVEGEVIRSGKNWTVTDFAAPEVPVGWNDMYVRAQQDPQIFEYTQELCRPVSTERVNGGVLYDFGRELTADTLIKINGEERPDQVTLCYGESRTEALDTQLCYLKQVLEIPGKKDSVPAGCASGPEREADCGASPFGRWESGQRYHTKLRAFRYIFVPEGENASLVTVEALYKYVDFPKRSSFSCSDGLINRIWEVADTTFRLASGIFFLDGVKRDRWIWSGDAYQSYFINQYLFFDKDICKRTILALRGNDPVTEHINTIVDYSMYWIISLENYYNMSGDLDFIRMVYPRMESLLRYCMEQTDGQGFIYGREGDWIYIDWAELDKEGILCAEQQLLARSYEAVASVRRLLGLDAEEFDVRKEALLKNIRQFFWDEEKGAFIDSYQSGRRNVTRHANIFAVLFGYADEAETESILHKVLLNEEVAAITTPYFKFYELEALAKLGRFEVVMDTLKSYWGGMLERGADTFWEEYKPEQPEEEQYGMYGDKYGKSLCHAWGASPIYLLGRYCMGVRPTGTAYETFAVEPQLELFDSFSCSFPVNEGTVWMDWKDGVLDVYTDKDGGVLKAAGKEYTLERGKHVVVKGR

SEQ ID NO: 1081 - protein, 786 aa, Catenovulum agarivorans
MKNSNLFAKLLAVVLIFLSNPTLAVEWTAEWIWSKERFTDPNSWVVIRKEVNLESVGQNSTAYISADTKYWLWINGQLVVFEGSYTGGPSPVKPSPRVDFYPIASNKYYDQVDIGRYLKKGKNTIAALAWYYGDNGQKGTYISSNTGGFIFQAHVGDNVIATDSSWKVLPHPAYDKKVIKKSPYRVAAWSVKYDARKDLNDWSNKAWYMPGYDDSDWQTPRIKRQPPRPPFFGLYPSEIPPLNNYGLANCENYPESKFPFISDGKTIKCKLDFNKNFTPYFDIEAKAGQQIHIKSNMRLNTIETFYTTKAGRQQFESYSWLNGRIIEYRIPKGVKVHGLKYRWTGVGTTPGHFEADDAWYSRIWQMAENTLYICARDNFMDTPDRERGLWIGDVADQASYLFYSMDKPGRDLLKKAIKVTLAFSDSESGIFAGLGPGRFRELPAQSLQFIEQGIWHYYYNTGDLETLKFAYPYVHRYLTLWGIKDNGLATFRTGDWKWTDWGPQDTIDYDVIQNALYYSALVSARKMAKAVGDYTHIGLYSHRINSIKQAYQKHYWQNGYFSSNPNKFKDDRANAIAILFGLAKPEQYQQIVDNVLIPNHFASPHFEWMVYNAMAIAGRYEDALQRMKTRYAKQVDNQALSTLAEYLPSGGTENHAWNAPSTVLSQHIAGIAPTSVAWESYQVMPNMAHFKRVKQFVPSVQGDIDFEIQRDQQTVKIEIDSPENTTAIIGVPKQYFAIQTIMVNGKKLWENGQLTASISGIKLAGEDNKYVKFEVQPGHWLVTAQR

SEQ ID NO: 1082 - protein, 1030 aa, Streptomyces avermitilis
MSALRVTSPSVEYVQRPLGLDAAHPRLSWPMASAAPGRRQSAYQVRVASSAAGLSHPDVWDSGKVVSDDSVLVPYAGPPLKPRTRYFWSVRVWDADGGASEWSAPSWWETGLMGASQWSAKWISAPAPLTEAPSLEGSSWIWFPEGEPANSAPAATRWFRRTVDLPDDITGATLAISADNVYAVSVDGAEVARTDLEADNEGWRRPAVIDVLDHVHSGNNTLAVSASNASVGPAGWICVLVLTTASGEKKIFSDASWKSTDHEPADGWREPDFDDSGWPAAKVAAAWGAGPWGRVAPVASAANQLRHEFRLPHKKVSRARLYATALGLYEAHLNGRRVGRDQLAPGWTDYRKRVQYQTYDVTSSVRPGANALAAYVAPGWYAGNVGMFGPHQYGERPALLAQLEVEYADGTSERITSGPDWRAASGPIVSADLLSGETYDARKETAGWTSPGFDDRAWLAVRGADNDVPEQIVAQVDGPVRIAKELPARKVTEPKPGVFVLDLGQNMVGSVRLRVSGDAGTTVRLRHAEVLNPDGTIYTANLRSAAATDTYTLKGQGEETYEPRFTFHGFRYVEVTGFPGKPSTTSVTGRVMHTSAPFTFEFETNVPMLNKLHSNITWGQRGNFLSVPTDTPARDERLGWTGDINVFAPTAAYTMESARFLTKWLVDLRDAQTSDGAFTDVAPAVGNLGNGVAGWGDAGVTVPWALYQAYGDRQVLADALPSVHAWLRYLEKHSDGLLRPADGYGDWLNVSDETPKDVIATAYFAHSADLAARMATELGKDAAPYTDLFTRIRKAFQTAYVASDGKVKGDTQSAYVLTLSMNLVPDALRKAAADRLVALIEAKDWHLSTGFLGTPRLLPVLTDTGHTDVAYRLLHQRTFPSWGYPIDKGSTTMWERWDSIQPDGGFQTPEMNSFNHYAYGSVGEWMYANIAGIAPGRAGYRQVVIRPRPGGEVTSARATFASLHGPVSTRWQQRSGGFVLTCSVPPNTTAEVWIPADHPDRVQHTHGTFVRAEDGCAVFEVGSGSHRFTV

SEQ ID NO: 1083 - DNA, 2850 bp, Artificial Sequence
  6xHis UPI0001A31108
atggttcttctgttcctgggtggggcgaaagagggagcagctcagagtaatcaggcgctgcaggtagcttctctgcgtaccgagtacctggtcaacccgattggcattgaagtacgtcaaccccgtttaagctggcagctgcaaagcgaccgccgtgatgttagacaggtagcctaccagattcaagtagccaccagtcgcgaggcgttagctaggggtcgtgatctggtgtgggattctggtcgtgtcgagagcgatcaaagcgtctttgttccgtatggcggaccggcgctccaacgtcgtcagcgttactattggcgtgtacgtgtatgggataatcatggtcgcagctctgcgtggtcggaaccggccttttgggaaatggggcttctgagccctgacgaatggcgcgcgcagtggattacctacaactgggaagaagataccagccagccacagccggcaccgatgttgcgtcgtaccttccgggtagaaggccgcgtccgtagagcccgtctatacattacctcacttgggttatatgaagcccatctgaacggtcgccgtgttggcgaccaattattcaccccgggttggactagctatcaccatcgcttgcagtatcagacctatgatgtaaccgatttattacgtcccggcgaaaatgccctgggcgttattttaggagatggttggtatcgtggttatcttacttggtctgtccgacgcaatgtatatggtgatcgcctggcactcctggctcagctggaaattacttatgaagacggccgcacacaagttgtaaccagcgaccctgattggaaggcgacgacgggccccatacgtatgagcgatatctatatgggtgaaatctatgatgcccgtctggagaaagaagggtggactgaacccggctacgatgactcagactggcgcggcgttcgagtacttgaacatcctaaagatatcctgattgcgcctatcggccctccggtcagacgcattcaagagatacgtccggttgcaattttgtacacgccggcgggagatacggtggttgacatggggcagaatatggtcggctgggtccgtctccgtgtgcgaggcccggcgggcaccgttgtgaccttacgtcatgctgaagtgttggataaacatggcaacttttatacggaaaacctgcgtcgtgctcgccaaacggaccagtacattctgaagggtgaaggtgaagaggttttcgaaccccactttactttccacggctttcgttatgttgctgtaagcgggtatccgggcgaactgacaccggaggccatcacggggatcgtcattcattctgcgtttgagcctaccggcacctgggtttccagcgactctctgctgaacagactccagctaaacatccagtggggcatgaaaggcaactttcttgacgtcccgaccgattgtccgcagcgtgatgaacgcttaggctggacgggcgatgcgcaagtctttgcacgtaccgccatgttcaatggtcttgtcggtggtttctttaccaaatggttaggtgatgtggccgcggatcaatcaccagaaggcgccgttcctcatgttgtgccgaacgtgcttccgagttttgcaggtcgcttcccaggtggagcaacgggttgggcagatgcagcggtggtaattccgtggacgatgtatcaagtctatggagatcgccgtattctggaagtgcaatatcccagtatgaaagcgtgggtcgaatatatgcgtcgcgaagccggcgatgatttaatttgggacacgggctttcacttcggagattggttggcgtttgtgcctgaagaaaatgtacgccgtgcgtatcctggtgcgaccacgggtcgagactttctggcaaccgcgtatttcgcatacagcacccggcttttagcacaagctgcagaagtcattggtaaaactgacgaagcccgtcactaccgtcaactgtacgaagcaatccgagaagcatttaaccgcgaatttgtaaccccgaacgggcgtgttgcgcaggccactcaaactgcttatacgcttgcaatccagttcgatctgctgccagagcacctgcgcgccgaagcgggccgccgtctggcagaagatgttcgcgcgcacaatatgcatctgaccacaggatttcttggcaccccccagctcctgcatgctcttagcaataccggccagctcgacgttgcgtatacgctgctgcgacaaaccacctacccgagctggctatatcaagtgaaaatgggcgctaccaccatgtgggaacgctgggactcgattaagccagactcgaccttccaagatccgagcatgaatagctttaaccattatgcctacggcagcgtgggggattggatgtatcgcgtagtggcaggcattgataccgaaactccgggctatcagcgactgcgaatagcaccgcagccaggcggtgggttaaaatgggtacaggcccgttaccattctctgtacggagaggtggcctcatcgtgggaactggtagatccgcaaacctttgtactggaagtgacaattccaccgaataccacggcgactgtgcgtttaccgggcgcgcaactggcgagcgttcaggaaggccgtcagccagtacaatctgcagcaggtgtacatcgcgcataccaagatggagctgatgtggtagtagaagtgggtagcggtacttaccgtttcacttacagccctagcgcagaattggttcgtcggattcaaactcagccagaagttggccagccggtgaccatgtcatttgaaaatctgtacttccaaggcagccaccaccatcatcatcattga

SEQ ID NO: 1084 - DNA, 3186 bp, Artificial Sequence
  6xHis UPI0001D90BFE
atggcgacaaccggcaaagcagaagcagctgagccgggctacggcggtctacgcgtggaaaaaaccaccgttgagtatgccgatcgtccactgggactagacgcgcctcatcctcgtctgtcttggcaactggggtccgaccggcgcaatcagagccagtcggcgtatcaactgcgcgtcgcaaccagtccgggtcgaattggtgcacctgatgtttgggattcaggtaaagtcagtagccaccagagcgttttagttccgtatgatggcccgaaacttcgtgcccgcacccgctaccactgggcggtgcgtgtgtgggatgggcagggccgtccgtccccatggtcggaaccgacttggtgggaaacgggtttaggcaccgaagatgaaggtgcagcacgctgggttgctgctcccgatacggtaacgcgtgggccggatctggcgaaagcggattgggtttggtatccagaaggcgacccggcctcgtccgcgccggccggtacgcgctattttcgtggctcattggatgtgtcgggctcggttcgcctagcgaggctggccctcgtcgccgatgacggctttaccgcgtgggttaacggtacggaaattgggggccgagctcctgtacaagaaaattggcggcatccggtagtggtggacgttaccgcactcctgcgcgaaggcgctaacaccattgccgttgccgccgttaacgcatcaagttccccagccggtttgttaggtgttctggaattaacagatactgacggcgttaggagtctgacaacgtctgcggcgtggaaagccaccgacaccgaaccttcaggcgattggcatcttccagcttatgatgatggaggttgggcagcggccaaagtgctcgccccgtggggaggtggtccgtggggtcgtgtgcgtgccgcccaacgtcccgcgctagtccgccgcgatttccgtctcgcagcaaaacctgtagctcgcgcgcgtctttacagcacagcattaggactttacgaagcagagatcaatggtcatagggtggggcgtgatcaactggccccgggatggactgattaccgcaaacgcgtccagtatcagacctacgacgtgaccgacttgttgcgtcacggcgcgaacgccattggtgttattctggcgagtggatggtactccggtagcgttgcatggttcggccaggaactgtacggcgagcgtccggcactaagggcggagctggaagtgacctatgcggatggatcgaccgatcgcgtcaccgcagatactcattggcgttgtgccacgggacctattctgaccgcggatttaatggcaggtgaagaatatgatgctcgtctagaagtgagcggctggtcttctcctgcttttgatgattcgttatggcagagtgtcgacgttgttccggcggacaccacgtcggcggtcagtgtggtggcgcagaccgatgcccccgtccgtgtcgcgcgtgaactggcggcggttcgcgtgacagaacctaagccgggtgtttacgtgttcgacctcgggcaaaatatggttggctcagttcgcctgagggtgcgcggggaagcaggtcgcacggttcgtctacgtcatgcggaagtgttggacaaagacggcatgttatacaccgccaaccttcgtaccgcacaggcaaccgattcgtacactttgaaaggcagtggtaccgaaacgttcgagccgaggtttacctttcatggcttccgctacgtggaagtcaccggttacccaggcaccccggacacaaaatcagtgaccggccgtgttatgcataccggtgcgcccttcacaatgtcattcaccactgatgtcccgatgttggaccagcttcatcgtaacattacatggggtcagcgtggcaacttcttgtcagtgccgaccgacactcctgctcgtgatgaacgccttggatggacgggcgatattaacgtgttcagcgcaacggccgcctatacaatggaatccgcccgttttcttgccaaatggttacgcgacctacgcgatggtcaatctgacgcaggagcctttccagatgtggcccctcgtattggtaatctgggcgaagggacggcgggttggggggacgcaggtgtgaccgttccgtggaatctgtaccaggcatacggcgacaggcaaattctggcggataactttcccgcgatgcgtgcgtggatcacgtacctggaacagcactcatcgggctgtctgcgtccagcagaaggctacggggattggctaaatgtggctgatgaaaccccgaaggatgtgatcgcgaccgcctatttcgcgcattctacgcagttggtggcaaaggctgcccgggtgcttgggcatgatcccgccccttacgatactttagcggcgaaagtgcgtgaagcctttaatcgcgcctatgttagtgcagatggcacggtaaaaggcaatacccagactgcgtatgtgctggcgttgagcatggatctgcttcctgactcggcccgtacgccggcggcagaacgcttagttgaattaatccgttcaaaagaccgccatttgtctaccggtttcctgggcacgccgcgcttactgccgactctgacggcgacgggccacacagatgttgcctaccagcttcttgagcagcgtacctttccgtcttggggttatcagattgatcgcggctctaccaccatgtgggagcgttgggattccttgcgtcccgatggctcttttcaggatccgggcatgaatagcttcaaccattatgcttatggatccgtgggtgaatggatgtaccagaacattaccggtattggcatgggtgaaccaggctttcgcagcattgttattcgcccgcgcccgggtggagatgtgcacgaggccaatggacgctatgatagtctgtatggccccattactacacgctggacacgcgcaaacgatggggcgtttaccctggatgtctctgttccggtgaatactacggcggaagtgtggctcccggccgccacttcaagagcggcctcagggatcagtcatgcgggagcaacctttttacgcctggatgacggttgcgcggtatatggcgtcggcagcggaccgtaccgcttcacagcgccagagaatttgtactttcagggtagccatcaccaccaccatcactga

SEQ ID NO: 1085 - DNA, 2898 bp, Artificial Sequence
  6xHis UPI0001A3AEAC
atgaaatttgcgcgcttaaacaccctgacggtttggctcatcacctctttcatcaccgtcagctttacgatttctgaggcgatcagtgcggatttgacccctgtgaatctgcgcaccgaatacaaacgcaatccggtcgtagatgtggataagccgcgcctgtcgtgggaactgaccgccacaggtcgtggtcagattcagacggcgtatcagatcctcgtggcgtcatcagcggcgttactcaatgctgaaaaagcggatctttggcagtccgctaaagtggcaggtaacgctacgaaccagatcgaatacagcggaaaaactctgctctcgcgtacggtctgttactggaaagtgcgttcttgggataaaaatgggcagccggggccttggtcggcagtagcaacctgggagatgggcttactcacaaaggctgattggaaagcggattggatcggcaatgatctgactgccttagggaaaggaaaaacctatcatctgccgccgagtccgttcttccgtaaagagatccagttaactgcacccgttaagaaagcgcgtctgtacgtaacgagtctgggcttgtacgagtatcagataaacggaaaacgcattggcaacgattacttcaccccgggctggaccgattataacaagagagtctactaccagacttatgatgtcacagccgatgttaaaccgggaaagaatgcattaggggctattctggcggatggctggtacgccggataccttggttatgcgctgctggtaggtaaccctgtagttaagaacttctacgggaatgtgcccctgttaaaagcccaactggaaattgaatacaccaatggcaaaaccgaaacgattgcgaccgaccagtcttggaaaacgagtcacggtccgattctggaagccgacattctgaacggcgaaacgtataatgccaatctcgctttcgataattggagtaaaacggggtttaatgatgcggggtggaaaaattcgacgatatttccggataaacctgatcggcaacttgaagcgtatccggggaatccagtccgggtatttcaggaactgaaggcaaagacggttaccccgaaagcgggtggacactatctgttcgacctgggacagaattttgctggtatggtccgcctgcgagtgaaaggcaataaaggcgataccattcgcctacgcttcggcgaagtactgttcccgaatggagatatcatgaccgaaaatcttcgcaaggcccgcgccaccgacacatacatactgaagggcgacccccaaggggaaacctggacaccgaaattcacttatcacggctttcaatacgttgatgttgccggtttcaagagtgcaccgggcctggatgcaatcactggtattgtgctgacatctgccactcctgagactggctcgttcgaaacagataacaaactgataaacaaactttaccagaatatagtatggactcagcgctctaattacgtggaggttccgactgattgtccgcagcgcgatgaacgtctgggatggacgggagatgcccaggcctatgtgcaaagcgcgactttcaacaacgacatctcagcgttcttcaccaaatggcttgtggatctgaacgacgctcagcgccctgataacgcgtacccgatctatgcgccggccccgaatgtgcgcaagactgatacctacagtcccggttggtcggaagctgggattatttgcccgtacaccatttacaaaacatatggggatacccgcgtcattcagaaattctggccgaatatggtggcctaccttaaattcatggaagcgaaatctcagggcacctacgtgtataaggaaggctcctttgcggaagttagcccaaagggaggctttggtgattggctttcagtcggtaaaaaaacgcctccagatatgctggcgactttgtactttggctacgcggcctcaatgatggccgatatggccaaagcaattggtaagccagatgaagctacctattacacgaccatgttcacaaaaattaaacaggccttccgcgcgcattacaccgatgagaccggccgcttcaaaactaatagcgccgcctatggtaatggtgagggttatgtggatggtgaaatgggctttgaaggccacacccagacggcttacgcaaatgcaatttacatgaatatgattgcacctgacctgactcctaaggcgggaaactggttggtagacctgatcaaagctaacgacaataaacttagcaccggcttcttaggcgttaagccgctgttgccctccctcagcatgacgggccactcaaatgaagcgtataaactgctgctgagtaccgaatatccgtcgtggggatttgaagtagtcaacggagcgaacaccatttgggaacgttggaactcgtatattaaaggtaaaggttttgagaataacgccggcatgaactctttcaaccattacgccttcggttcggtcaatgaatggctgtttggcaatgcggccggcattaaagcggcagaagcggggtaccgtacctttattatccgtccggaactggccccgcagggtattaatttcgtgaacgcctcatatcgctcgatcaatggtacgattgtgagcagctggaaaaaagagggaaaccgcgtgcgcatgaaagtagtggtcccggctaatactacggcgacagtgttcattccgattaccaagccggactcagtgctggaatccaataaggccctgaccgcgagccaggacatccgtgtgattggcgcgcgtgacggttatcttcaggtcactgtgggatcaggcacctatcagttctcggctgtcaacgagaatttatattttcagggatcacaccatcatcatcatcactga

SEQ ID NO: 1086 - DNA, 2838 bp, Artificial Sequence
  6xHis UPI0001CD6D48
atgggcaaaatctatgccgctaagacgaaccatattaccaatcccattggttttaatatggatagcattgccttctcatggaaggtgaagggttgccgtggccaggaacaaaaatacgcgcgcattgtgatctccaagaacaaaacgtttacggacatctgctatgacaccggggaaaccgaactggattcattgagcacgcgtgtggaattcgaaattcagccgtatactcgctactactggaaagtcattgttacgacggatgtggaagaggtgattgaatcggatgtccaattctttgaaacggcgaaaatggacgaaccttggaccggccgctggattacctgtgacagctcgcaagaacgtcatcctatctttagtaaacgcatcgaaccgaaaaaggaagtcaaaagcgcgcgcctgtatatttgtggcctggggctgtacgaagcctattttctgggcgaaaacaaagagaacccgaaaaaaattggtgatgaatacttaacgccttactgtaacaactacgaccgttggattcagtatcaaacctatgacattacagaacaagctgaacgtggcggggtccttagtgtgctgctgggcaatggctggtataaaggacgcttcggatttaatgacccggaacgcgaagcgtattacggggatgaatggaagctgatcgcagaagttcatatcgaatataaagacggtacgaaggacgtgattagttctgacgaaacttggagtgtgacccgctctaatctgtggttctccaatatctacgatggtgaacgccgcgatgataccctccctccggtcgaagaaagcccggcccgtattgcgaaagcaccgaaaggccgtttgatggagcgtttgtcgcttccggtgaaagtgcaggaagaaatgaaaccagccgagctgattcacacccccgccggagaagacgtgtttgaccttggtcaggagattacaggtatcttccagctgcgtgtgaacgagccgagtggtaccattatccgtattcaaacgggtgaaattctgcaggatggttgcttctataacgagaacctgcgcaccgcccttagcgagtacgtctatgtgtcggatggcatggagaaagtaattattccccattttacctactacggctaccgctatgttaaagttagcggagtcactaacctgagttgcgaagatttcatggctattgtgctttattccgactatgaatctattggcacagttgagactggctccgagttagtgaataaacttatcagtaatattgaatggggcatgaagggcaacttcctggatgttcctaccgattgtccgcagagggatgaacggatgggatggacgggtgatacccaggtgttttcggcgaccgcctcatacttggccgatacctacgccttctaccgcaaatatctgtatgatctttatcaggaacagttgcttgcgggtggcatggtcccggaaatcgtacctacctttggccctaccaagtgctcctgcgcatggggtgatgccgcgtgcattatcccgtggaatgtgtacttgtttagcggtgacaagaccattctggaaaatcaaatcgaatccatgaaagcctgggtggactatatccgtcgcattgacggtgatcatcacggttggcgtcaggtatttcattatggtgattggctggctttagatcgtaccggagcagcagcaaatagcgtgtatggcgcgactgatgaggcatacattgccgatatttactacgcagcatcggcacagattgtagccaaagccgcggaagtgctaggcttagaagaaacacgccaagagtatcataaaattgcagaccgccaatggcaggtggtgaaggaggaatattttaccgcgacgggccgatgtgcggtcaaaactcaaaccggcctgattctcgcgctgaaatatcacctttcggaaaacgaagaactgacccgggagatgctgaaaaaactgctccgcgataacaaaaacaaacttaataccggcttcgttggcacccccctcttatgcaatgtgctcacggatcatggtatgaccgacgccgcatatcgcctcctgctgaacgaagaatatccaggttggttacacgaagtgaaactgggtgcgaccacagtctgggaacgctggaactcacttgatgaaagtggtcacgtaagcagtacgggcatgaatagcctgaaccactatagctacggcgccatcctggaatggatctttcgccatgcagcagggattgatgtcatggaacagagccccggtggcaaggttatgcgcattagcccgaaagtgaacagtgagttgaaatacgtgaaagcggtatacgatagcgcaacgggctgctatcagtgcggctgggaaattttagaaggtaacaagattaccataacagtcaccgtcccctttggtggcaaagcggaagttgtcttgccgtatgcccctgaatgcatttacgaagatattgaaaatccgctattcgaagcagtggaaaacggcatctgccacgtgaaagcaggtgaatacgaagtggtatatgaagcctcagaaccgttaaaaaagcgctacagcattgactcaactatggaggagctgttaaatcatccggatattagagcttttctgagtcagatggtggaagtagacatgattccggacattgcgtacggcttgtcactacgtgatgtagcaaaaacctttgcgggcgaaattaagccagatgaagcccagatgctggataaagcattggcgaagtttgaaaacctgtattttcagggatcgcatcatcatcaccaccactga

SEQ ID NO: 1087 - DNA, 2715 bp, Artificial Sequence
  6xHis UPI000442EF22
atgaaaattaaaccgacgcaattgacctgcgagtacctgaaaaacccgagtgtcgtggatgtgttgcagccacgtttagcctggattaacgtagcagatgctggtgaacgcggccaagaacagaccgcctatcagattcgtgtggcgagcttaaaagagaagctcgaaaacgcggatttgtgggattcgggtaaagtcaaagacgacgcatcgatacgtgtcaaatacgatggagaaaaactggtgtcacgtcaggattgttggtggcaggtgcgcgtatgggataaaaataacgaggtgtcagaatggtccgagccggcgtactggcacatgggcctgttaaacgagaatgattggacagctaattggattggagtgccgtggcaaggcgaggagacactgccaaaaccggcaagccctgctgcaacgttgccaggggaacttccaccaccagccccgctgtttaggaaagagtttaacgcaacgaaacaagtggaaaaggcggtcgcgtatgtcaccgggctcggctacttcgagttatacctcaacggcgagaaagttggcgatgatgttctagtaccgaatcagacaaattacggcaaacgcccggcgcttacgcaacaatacattccgctggacgataacttcaaagagtataaagtgatgtacctggcctacgatattagtgatcagcttgtgagcggtgcgaatacttttggcgctatcctgggcaacggcttttacaacccgtcgaaacattgggccctcggttacgggacccctcgtttgttagtgcaggtccatgtggcatacaccgatggcaccgaggaattgattgtgtctgatgaaagctggaaagtttccaaaagcccgattctgatggacatggtttactatggtgaacactatgatgcgcgtttagaacaggatggctggtgcagcgcgggatttgacgatagcgcatgggagaacgccattcttcgtaaggcgcctgagggcaaactggtcgcccataccgcgcatcctgacaaggtttatgagacgctccaacctgttcgcatcgaaaagatgtacaacggtaactataaagtcgatttcggtgaagaaatcagtggctgggtccgtcttaaaaacgtcgagggaccggaaggtcataaagttaagattaattacttgtcgaataactactctggagataattcttatatctttaagggcgaaggcaaggaaaactatgcagcgcgcttcaattggtttgtttttcgtgaagtggagatcgagaactggccgggtgtgttagcccctgagaatatttgcgcagaagcaatcaacacttatattgaggaaagcgcgcattttgagaccagcaacccgcttttcaaccaggttaacaaaatctggaaacgctcgcagaccgataatatgcatggcggcattgccagcgattgcccgcaccgtgaacgctcaccgtataccggtgatggtcaggtggcgtgcgtcacggttatgcacaattttgacgcgcagaatttttactacaaatggatccacgatatgattggcgcccaaaatgtgaaaacaggttatgttcccaacggcgcaccttggcagcctggttgcggtggcggcgtggcctggggcgcagctattaacattattccgtgggaattctatgttcattatggcgccgtggatatgttagaggaggcatatgaaccgatgaaggaatacgtccgttacatgcagacttgggtgaacaatgaaggcattatgaactcccagcgtgtcggactggacggcaacgtgctgcaatggttcaatctgggagagtgggttaccccgggtgacctccctcctgactcgttagtccatacgttttatttctggcgatgtgccgatatcacggcgaaaactgcggagattttaggtaagcgtaaggaagccaaacgtaaccgcgagttggcagaaaccacccaaagcgcattccacaaatgcttcttcgatgcagaaaaaggtacctacgggaatgcaggcgcaaacatttttgcattaaaaatgggagtaccggaaaatgaataccagcgcgtcatcaacgcgctgaaggccaatatcaaaaaaaataaaggccacctggacaccggcattttcggcacgcagttctttttcgaagttctgagtgaaaacggactgcacgaattagcgtacgaagcgatgaataagaaagaagagccaggatatggtcgttggctgacacttggtgcgacgacatcttgggaaaactggaacacagatggatctcacaaccatccaatgttcggcggaggtctggtgtggctgtatcgcaaacttgctgggatgcaagcggatgaaaagaaccctgggtaccgccacatcatcttccacccgcagccgattaaggaactggaatttgcggaatacttcaataaaaccccgtacggtaaagccgggattaagtggcagcaaacggaaggtaaactgtctgtgggtgtgactgtcccggtcggatgcaccgcgacggtgattttaccgggtggtcattttcttgcagatggaaaggccatggaaaaagtggccgaagttcagctggtgagtcagaaggaagatgaactgattattaaggtaggtgccggaaactaccaattcagtaatgaaaatctttacttccaaggctcccatcaccaccatcatcattga

SEQ ID NO: 1088 - DNA, 3291 bp, Artificial Sequence
  6xHis UPI00019E052B
atggcgccgtcgccgagcctgagcttaagcgcgagctccgcgggaactgaggtatcggtatctgccttgcaaaccgatgcaaccacaaacccgctgggaatcgatgacccgcacccgagcctcagctggaaactggcgagtcaaattaatggagaatatcagagtgcctatcgtatcgtggttgcgggcagccagagcgatgcaagcgcaggtgttggaagcgtatgggattcaggcgaagtagcgtccggcaactcagtaggtattgcatacggcggtcccgctcttgcgagtgagaaaacctattactgggccgtgcagatttgggatgaacatggcactgcttctgggtggagcgcccccgctcaatgggaaatgggtcttctcaatccaggcgattggcaaggagcacagtggatttcaccgaccagcgcctcggccgcaagtcccctgcttcgcaaggactttaccctagccaaaccggttgcgcgggcccgtgcgtatgttttcggtttagggttttacgaattacatctgaacggagggaaagtaggggatcgcgtgcttgagccggcgtctactccgtatgcccagcgtgatttatatgcagcgtatgatgtaacgggtacagtgaaacaagggggcaacgccgtcggtctttggctgggcaatggatacgatgcgaacttttctcaatacggttttcgttggctcggtcctaaacaagcaattgtgcttattgacgtgacttttagcgatggaacccaccaagcggtgactagtgacggtagttggacgtggtcaccgtcaccgataacggcggatggcatttataacggtgaaagctacgatgctcgcatggtgcagccgggctgggatgctgcaggattctcggcgtcaagtctgcagcccgtacggaccgtagctgctcccggcggctctttagtcgcggatgcgatgcctccgatccgggtcactcaaactttaaatgccgtcaaactgacgagcccttccccgggcgtttacgtttacgattttggacaaaatgtatcaggctgggaggttctgaggacccaaggtgccgcgggcagcacggttaaaatgcagaccgctgaggacttgctggctaatggtacgattgatacgacgacgaatcgcaacgccctgagtactgattcatacacgttagccgggaccggctcgaccgagacgtatgagccgcgttttacttatcacggattcagatacgtggaagttaccggggatccgcaaacgccggtcgtgtcatctctgcaggcccgtgtggtgcacgcggacctggctagcacctcgacgtttagttcttcggatgcgacgctgaatcagatctggcagaacaaccagcgcacaatgctgaataaccaaatgagcacgccgacagataacccggtgcgagacgagcgaactccgccgggaatggatgtgcaggcgtatcatgatgcgagtactgcagaattcggcatggacacgtattatgcgaattatctgcgcgatatgccgccagggaccgccttaccctctgacggaggaaatgcgcagcagcccgatatggggggagatcaagtcaccttagcgtggactctttatcagcagtacggggatattgcgactttggccgccatgtatcctctcatgaagaagttcgttgacactaacgcgacaaacgtgcctggacacatttggtcgacaggatttggcgattggtgcccacctgatcactcgtccaacgccaacgggggcatggggaacccttctgcgggagcttgcactagtgaggtcccgattgtcaacactgcgctgtcatacttacaggcgtcagatgttgcgaaagcagcgaccgcactcggccaggcgggtgatgcagcgcactacacccaactggccggcgatattgctaacgcgtttaacgccgccttccttaacagcgatcatgcgagctatggtgatgggcgcgagaccacatcaattttgccactggcctttggaatggtgccggccgccgacgtgccggcagttggagcacgtcttgtagatactgttgttcgcggtaatggtggacatctggataccgggatttttggcacgcgttatttgatggacgccctcgctggaattggccgcaccgatctggccatgaccgtgctggatcaagggacttacccaggttacggcttcgaaattgggaaaggcgccacaacagactgggaggaatggacctatgcatcgagcatggaatcacacgatcacgccatgttcgcaggcattaacgcttcatttgcctctcgtttggccggaattgaacccaccggcccgggttattcaaccgtatcgattgctccacagatcccggcaggtttgcagagcgtggctgcgtcggttagcacggtgcgtggtaccgtagcgagcagttggtcggtcagcggcggcaaggtcacaatggatgtcacggttccggtaggtgcaaccgccagcgtgcgtgtcccgtcttttggtcagggtagcgttactaccgtgagcccagccggtgctggtgcagtgcaagtctcagcgggaggtaccagcagcacctataccgtaggcagcggttcatgggaatttacaggatcccttgttccggcgagctcaacggtgctcccaggaacctggacccagtgcgctgttgaaacaggtaattgctcagtggcgggcaccgaaaccgtcgccttcggagcccagggaaaatatgattatgccaccgtctctggcacggttgcctgctccaataccgtctttggtgatccggattccggcgtaagcaaagcgtgctacgcggaaccggcccctgcgaccacccctggagcatggcagcaatgcgccgcggagactgcaacctgttcttttgcgggtacagaaacagttgccttcggtgcccagggtaaatatacctatgccactcttaccggcggtaccccgtgcacgacgactattttcggcgatccggcgtacggcatccccaaaagttgcttcatcgaagccccacctccggcggccactacctggattccgtgtgccgccgaaactgcgacatgcacgctaacagcaagccgtgacgttgcgttcggcgcacatggcgattatgcgtatcgcaccgccaatgcccccacaacgtgcacaaatgcggtgtttggcgacccagcgccgggcgcggtgaaggcatgctatttgcaggaaaatctttactttcagggatcacaccaccatcaccatcattga

SEQ ID NO: 1089 - DNA, 2244 bp, Artificial Sequence
  6xHis UPI000005ADE1
atgagcttgattcttctaggtgccctgtcccttgcgagttccacttttgcgcagacctggatctggtatccgggtgattatgagatttggctgggcaatcagatgaataatcgtcgtactgagcgtggtgcattctttccgccgttctggaaaaccgatagccactacgtggttgtagagtttagcaaagttctgaacctgagcgagcccgaagaagtatttattgccgccgaaggcacgtacaacgtgaaacttgacggcaaacttcagttcggcatgccagagaccctgttgctgcctgcgggcaaacactcacttaacattaaagtttggaatcaggcgaccccgccaaccatttatgttaagggtaagactgtgaactctgactcgtcttggcgcgtaacgtatgaagacaaggaatggattgatgaatctggcaaagcgagcgacacctcagccactatttacatggacgccggctgctggaactttgatggcgctacccaacgtccttctcagttttcgttaatgcgtgaaccgcaacagcccgtcgcgaagacggaacagccggagggcggcatcttgtacgatttcggcaaggaaacgtttggttttattacgctgaaaaatttgagcggtaaaggcaaaattgatctgtattatggagagagcccagaagaagcaaaagacaaagcctactgcgaaaccttggataaacttcttcttgagccgggtcagattaccgatctggccattcgtagcacgtcccctctgcatcactcggataacgaatatacgctcgaaaatagcaaggccttccgctatgtctacataacccacgaacccgaagttcagatcggggaggtgagcatgcagtacgagtacctgcccgaggaatatcgcgggaatttccgatgtaatgatgaagagttaaactgcatttgggaagtgggtgcgtacaccatgcacctgaccacccgcgaattcttcatcgatggcatcaaaagggaccgctgggtttggagtggggatgcgatacagtcgtacctgatgaactactacctgttctttgattcggagagcgttaaacgtaccatctggttgctgcgagggaaagacccggtcacgtcacatagtaacacgatcatggactataccttctactggttcctgtcagtttacgactattatatgtatagcggcgaccgccactttgttaatcaactttaccctcgcatgcaaaccatgatggattacgttctgggtcgaaccaacaagaacgggatggtggagggcatgagcggtgattgggtatttgtggattgggcagacggctacctggataagaaaggagaactatcgtttgaacaagtcctgttttgccggagtctggagacgatggcactctgcgccgatctagttggcgataaggacggccagcaaaagtatgaaaagctcgcctccgccttaaaagcgaaactggaaccgactttttggaacaaccagaaacaggcctttgtacataattgcgttgatggtcgtcagagcgacgccgtgacccgttatgccaatatgtttagcgtgtttttcgattatctgaacgctgataaacagcaagcgatcaaacagagtgtgctgctgaacgatgaaattctgaaaatcaccacgccatatatgcgattttatgaactggaggctctttgtgccttgggcgaacaggaaaccgtgatgaaagagatgaaagcgtattggggcggtatgctcaaggccggtgctacgtcgttttgggaaaaatacaatcccgaagaatcgggcacccaacatctcgccatgtatgggcgcccttatggtaaaagcttgtgtcatgcgtggggtgcaagcccgatctacttgctgggtaaatattatcttggggttaagccgaccaaagaagggtataaggaattcgccgtatcaccggtattagggggactgaaatggatggaaggcactgtgccgacgccgaatggcgacattcacgtatacatggataacaaaaccatcaaggtgaaagccaccgaaggaaaaggctacttaacgatccaaagccgtcgccagccgaaagcgaacatgggcaccgtggaaaaagtttcagagggcgtatggcgcctgtggatcgactcaccggaagagcgcattgtcacctaccgattagaaggcgaaaatctctacttccaggggagccaccaccaccatcatcattga

SEQ ID NO: 1090 - DNA, 2955 bp, Artificial Sequence
  6xHis UPI000172B2E3
atggctccggagaccccagctgcaccacctccagctgcggctcagcccctggcatggcctgaggtgcatcgcgaaaccaaaccgtggtcccgctggtggtggttcggtaacattgccgatgagaaaagtgttactgcccaacttgaagcgtgtgcagccgcgggtttgggaggccttgaaatcacgccgatttacggcgtgcgcggctatgaagatcgttttgtgcctttcctgtcgccccggtggatggaactgttacgccacaccttagtggaaagccgtcgtctgggtctgggcatcgacctggcgacgggtacaggttggccgtttggtggcccgtggctccagccggaagatgttgcacataccctggctcaccgtgtttacgagattaaacctggtgaacgcctgggtgagccggttcgtctgaccgcaacgggcttagtgcgtgttgcaggccctcgcccggtgaaactagaggaattgcgtgaaccaatcacggcgaacgcgaacctccaggaactcgcactggatcaggtacgcttccccaaaccgatgcgtctggtgtcactgatggcatttcctttagctttagcaggcgtagcaccgactccgctggatctgactagtcgagtgcgcgcggatggtagcctggattggacagccccggcggatgcaggcacttggacactgtatgcactgtttgctggtccgcatggtaaaatggtggaacgcgcggcacctggcggggaaggcttcgcgttggaccacttttcgagcaccgcactccgcgcttaccttgctcgctttgatgcagcttttgccgaaggtcatctgttatcggatcttccctctgccgcgggagcagattcagcgcctcgtctgagagcattctttaatgatagctatgaggtggatgacgccgatggcgaagcgaactggacgccgcgattcctggaagaatttcagaaacgacgcggatacgatctgcgagcgcacctcccggaattgcttgccacgaccgaaaacgattttagcgcccgcgtacgctccgactaccgtgagaccatttcggatctgcttctggacgaatttactaatccgtggcgtgaatgggcacaccagcacggcgcattgatccgtaatcaagcacacaacagcccggcgaatattctggatctatacgccgcctcagatatccctgagcaggagggtaacggcttcctggcaatgaaactggcgtctagcgccgcccatgtaagcggtaaacctttggccagcgctgaaactgcgacttggcttaatgaacactttctgacgactctcgccgagttgaaacaaaataccgatgaatttctgctcgccggaatcaaccatgtgtgctaccacggaacggcgctttcccccctggatgccgcctggccgggctttaatttctacgcctcggtggagcttaatcctctgaatcccttttggcgcgatttcaccgcgctgaatgcatatgtagctcgcgcccagagctttcttcagtccggcaccccggacgaagatgtgctcctttattacaatattcacgaccgttgggccgagcgtggaaacggtcgcatgcctcatttcggacatggtgggcgggatccgagcggtagtctcgcggccactgcagccgcattacatgaagcaggcgtgggctttgattacgtgtcagaccgtcaactgcaaaagattacgcctgaccgtgcgatcgttgttccgcaaactaccttcatgccggaagcgaccctggcacgtctggttgaactggccgcgcaaggtgcgacaattctgtttgtggatcatctgccgcgttccgcccctggtctggcaggattgaatgcctcgggccgcttcgaacagctcctccagaaaattcagacacagctggcgccgagcgatgttctgtccgccgcaaaattagatgggggtcaatttctattaggcccagggattcgtgaactgttagatcgctgtccgggaattgcccgtgaatcgcttcgtccgtttggcttagagttcgtacgacgacgtaccgacgccggcgcgctctactttctggtaaatcgttcaaaccagccgattgatcgctggatccccctgcaatccccggcagccgctgccgccttgtttgatccgatgaccggtaatgccggactcgcggcgatccattcatctggcccgacgggttctgcgtcaattccgccggcacactctgacggtgcccgcgcgtcgcgcgccccgaccgagatttacttacaactggctccgggcgaaagttgcgttgtccagttgcatgccacccctgtagcgggtccggcgtggcactattggcagcgcgcaggtgaaccgcatttactcacgggagattggtcggtaacgttcacggccggtggcccggcattgccggccgcagctcagttacatgcgttaacctcatggaccgactttgcgggtgaggcaggtcgtgcgttttcaggcacagccgtttacacccgccgttttgcgcgcccgtctggcgatgcgcctgcgtgggaactggatttaggcacggttggcgactctgcacgagtaaccctgaatggtcgcgaattaggcgtgctcatccagccaccgtggcgcgtggttattccggcaaatgagtggcgcgatgaaaacgcattagaaatcgatgtgacgaaccttgccgctaatcggattgctgacttagatcgtcgtggagcgtcttggaaaattttctacaacgccaattttccggcccgcttccgtgaaaatgtgggaccggatcgtcaatttactgcggcacgctggctgccacgcaatagtggccttttgggacccgttaaactgactcccctgcagaagagcgacccgaccttagagaatctgtacttccaaggatcacaccatcatcatcatcactga

SEQ ID NO: 1091 - DNA, 2736 bp, Artificial Sequence
  6xHis UPI00015FE0BE
atgaagagcttcattaaagaactgatcgaacaaaaagaaggtaactacatcctgccgttcttttggcagcatggtgagagtgaaggtaaactgagggaatacatggaagccattcacagctgtgggattcgtgctgtgtgtgtcgaagcacgaccgcacccagattatcttggcccgggctggtggcatgatctggacatcattattgatgaagctaaaaaacgggatatgaaactgtggatcctcgatgatgcgcactttcctaccggttatgcggccggaaaaatcgcagagtccgaagacaagtattgtaaacaatacattagccgtaaattcatcgacgtttcagggccgaccccggaagttgaagtaaacctggcggccatgatgatgccgattatgttaccgagtggtctgaacctcgaaatgtttggaatgagttctgaaaaaaagcggtacttcaccgatgaccgcatcctgagcatccgcgcgtaccagatggataaggatagctcgctgattggtgaaggcattgatctgaccacgaatattgtgaatggaaaactcatctgggatgtgccgaaaggtacctggcgtattaacgtcttattcattacccggaatggggagggccggtgcgattacattaatatggtcgacaaagatagctgtcgtattcaaatcgacgccgtatacgagccgcattacgaacattataaagaggagtttggcaaaacaatcgcgggattcttttccgatgaaccgtgcctgggtaattccatcggctacaattttgacgagagcataggtaaaaagaaaacccctctgccgtggtcgagccaactagaaaaaatgttagaagagaagctgggcaaagaatacctgccgtattatccggcactatggaccgacatggcggatgagaaagtgaatgcgcgtgttcgttatgcctacatggattgtgtgacccgcctggtcgaagaaaactttagccgtcagatcggccagtggtgtgaagaacgtggtgtagaatatattggtcacattgtggaggacaataatcaacattcacgcctaggcagttcacaaggacatttcttccgtagcatgatgggacagcacatgtccggaattgacaatattggcgatcaggtcctgccgggtggcgagaatcataaacgtgaagcccttctcggcgcggacaaggatggggaattctatcactacgaattgggcaaactggggtctagcttggcgcacatcgacccgaaaaagcagggccgcgctatgtgcgaaatttttggcgcctacggctggcgactgggcatccgcacgatgaaatacttaatggatcatttcctggtgcgcggcataaatgtctacgtgccccacgccttctcaccgaaagattttcctgatagtgattgtcccccgcatttttacgcaggtggcgaagatccgcagttcaactactttaaaaaactgatgcactatacaaacagaatgtgtcatctcctgaacggaggtacacatattgcccccgccgcggtgctttatcatggcgaagcggaatggaccggcgggtgtatgttcaaccagaaagtcgcccgtgaacttctggaaagccagatcgattttgacattctgccttctgatgtatttgcagacatgtcggcgtacaatgccaccttcgatgggttcctgcaagttaatggggaaagctatgattgcttcattgtcccgtatgcggaattcatcaccaaagaagtggccgtgttcgcaggcactgccagcaagaaaggttttcctgtgttcttcgtgcagggtttaccggagagcatctgtaacatcgataaaaaggaagaggaaaaattactgctggatggcatgtcggaatgcattgttgtgccactggaggcgctgtcaaaaactctgaaagataacaaactgttcgaaatcagcagcgataatcagttcgacggtttgcggtactaccactataggaaagagcagaccgagctgtacatgtttagcaatgaatcaattggtaaagaatataatggttggattactgtgaaatctaaaggcgaagtctcactgtatgatgctatggataaccgcataattcctgcagaatatcgcaacaccgaggatggtacctcgatccatatccgcctgaccccctaccagtctgtggtcgcactgtttgaagacctcaaggaagtagaggaccaagggaattttgaagccaaaccaggctatcgcctggatgccgcgtggcgcatctcctctgcggaagtgagcaaatatcccgaattccagccagtcgaagtcactaccgaacttaaatctatgggccgagtactgccggatttctcgggttacctgcgctacgaaagcgagttcgtgtatgatcgcatgccgacgggtcgtgagcttcttaatattactgacgtctatgaaggcgctgaagtgtggctgaatggccactgtcttggcatgaagatctgtccgccatatcagttccctctgggtgaagcattacgtgcaggtgaaaaccatatccgtatcgaagttgcgaccactctggatcgcaaagtgaaaagcctcccccaggatatgcgttcactgatgttttactcaaaaattacggaaccgaccggaattgttggctcagttgaaatctggaacgagaacctgtacttccagggctcccaccaccatcaccaccactga

SEQ ID NO: 1092 - DNA, 2262 bp, Artificial Sequence
  6xHis UPI00022DA3ED
atgctgtccattgccttagccgcagccttggctgcaggtgcggttgctccggattggcatgatggtcttgattggcacggggttcatgtcgccatctctcgtgatgcccagcagggatacaccctggcgtggccgtatggtcaacgaactattgcggcacaacccctggccactcagaccgcctcacccttgttcgatggcttatttgccatggcgcaggatgatttaaagcaggattcggtatcagctattcgggatggggcctttgatcacgggcagccgatcccttgtcagtgcttcgaaaccggactgaaatggccgtacgtttggacgcgcgacttgagttatgcgatcgacctaggcctgtggcgttttgatcctgcccgaagccgtaatggtctcaaatttaaactgtcgggcgtgcgtgttgccagtgcaccccaaggtcctgccccgaaaaggctgtatcccatgcaggataccggctccggtggttcctggccgatctccaccgatcgcgtagtctggttcctaggggctcgtcatttgcttgatgaccaagcattcgctgatgatgtttatagagccctggatgcgaccctggcccaggaccgtcagtatgcattcgacgcaggttttggtctgtaccgcggtgaaacttccttcctggattggcgtgaacagagctatccggcctggaccgccgacgaagtaacttttattgcgcagtcatatgccctgtcaaccaatgtgctgcactaccaagcgctgcagttggcggccaacttagcggatactcaccacgatgcgaaagccgcggccggttatcgtgcggatgcagccgcgcttaaagccgctattaatgcccatttttggcgtgccgaacgcggtatgtacatgagctacctgtctggagatggtactccatacgatagctatgatctcctcggcattgccctcgccattgactcaggcgtagccggcggtgaacgtgccaaacaagcgttggcgaattacccaacctggccggcgggatcacccgttatttggccggaacgagcggatcaaccgatttaccataatcgcgccatctggccatttgtgagtgcgtacgctctgcgtgcggcccgcttaacggaacagccagcacgtattgctcatgaaattgaaagcgttttgcgaggcgcggcgttatatggctcgaacatggaaaactacgaactgcttacccagggccaacacgtggacgaaggtaaactgagcgggcctgttgtgaacagtcctcgtcagctgtggagtgtcgcggcagccctggcggtagtaacggaaggtgtctttggtttaaatgaagatggttctgtggaaccgaagctccctaccgcgctagtacccatgcttttcggccagcgccggacaatcaccttagatttacatgagcgtcagatcacacttcagttgcctgaaaaaatctcgggtaacctgctggtcgcggatcgcactcgtacacagggtaccgcaaccaccgtaactctgaaggccgtgcaggtcccggatgcgcctttaagaaccgatgcgccgttgtatgcaccattagctcctgcggcgccagttgttcaggctgccggtaatggctggcgagtgagcgccgaagggaaggtccgtttgtacctgaacgggcgcgctcatggtgatatcgatggcactgcaaccttaccgcgtcagccgggccttacttgttttagcgcgacccgcgttgatgctcatggcctggaatctctgcattcgccggatacttgtgtcggcgaaaccgcaaaggttaatgggtcgtggccgcgacgttggactgcccctgccaccggtcgatatcgggtggcactggactatgccaacgatcacggaccgattaacacgggcatcactgcggcagtgaaaatgttagaggtgagttgtgcgggttcagacccacaacgtctaccgattgtaatgcctcatagtgtcagggcccaacgttccacctggggtacctttaccgcacaagcgggctcggcctgtcgtttcgcgctggatgatggctttaatatgtcgtatctagcgcattttgcccattacacggcgaacaatgggtcagggggtaacggcggttctagtggtccgctgaatcaggcagaagtgcatgcgttgctgattgcgccactggccgccgatcgtggtacgcccgaaaatctttacttccagggtagtcaccatcatcatcatcactga

SEQ ID NO: 1093 - DNA, 2394 bp, Artificial Sequence
  6xHis UPI0001D07633
atgtggccgcagccgaaaccggaggcaaagccgggcacacgttggtggtggctgggtagcgcagtgaatcagcgtgacctgcaatggaacctgcaagaatatgcgcgtgcaggcatcggtgccgttgaaattactccaatctacggggtaaaaggcaatgatgccaacaatatcgcctacttgtcacctcaatggatgcaggccctgcaaagtgtacaagatatcgcacgcccgttgggtattgaagttgacatgaactgtggcacgggttggccgtttggcggcccgcatattagcctggatcaggcggcttgccgggccattattaaggacacgattattaacgggaagcaccaatatgaagtcgagattggccataccaaacagaaagtgaagcgagcagcaccgggcggcgaaggttgggttgtggatcattttgatcgtaatgcggtggcccactacctggatcgctttgagcaggcatttgccaccagcggtgttccttatccccataccttctttaacgatagctatgaggtttacaaggcggattggaccccaacgctttttgatgagttccagaaacgtcgcggttatgatttgcgtacgaaactgcccgaactgttggggaaagtcgatgatggcaaccaaacccttgcggattatcgcgagactttgagcgacatgctgctcgaaaactttacccagcagtgggttgcttgggctcataaacatggagttaaagtaagaaaccaggctcatggcagtccggcgaacttactggatttatacgctgcggttgatatcccggaaattgagggctttggactgagtgaatttgggatcaaaggcctacgtacggatccgggtaagaccaggaaaaacgacagcgatgtgtcgatgcttaagtatgccagcagcgcagcgcatgtaatgggaaaaccgtttacatcaagtgaaacatttacgtggctgacggagcatttccgcacaagcctttcacagatgaaaccggatttggacctgatgtttacttgcggcgtaaaccacgtgtatttccacggctcctgctacaccccacagaatgctgcatggccgggttggaaattctatgcgagcgtagatatgagcccgaccaactcgatatggcgcgacgcgccattcctgatgaaatatattgaacgctcccagtcgtttctgcagctgggagaaccggataacgactttttggtgtatctgcctgtccgcgatatgtggcaccagcgtgataacaataacacccttctcatgcaattcgatattcatagcatggcgaaaaaggctccgcagtttattcgctccatcctgaccatcgattcgctgggttacgactgcgactacatttcagaccgccaattagcgaaagtgcgcatgcaagatggaatgctggttaccgaaggcggcacccgctataaagcgctgatcattccgtccggaaccactattgacgccagcttacaggcccagattaatcggttgaatgcctatgtgattcgtggagaacaggccgcggacatggccaaatttgcaaaagcggaacagatgaagaccacttatggcctgcgcgcgatacggcgtcatacggcggatggctggcactactttattgtgaacctgaccccgaaagacattaccggcgatgtcactttagctgtgcctttcgagtcggcaacctggtttaatccaatgaacggcgacattcagcctgccgaagtccacaatggtcagctgcatattgcgctgaagtcgggagaaagccgcattcttcagacttccaatcagccaagcacgaatattacgaccactgcctcaggcactgaagaaatcactctgcaaggaccctgggtattatcttttacagacgaaagcccacgcgtcgaaggcacgtttaaattaaataaattacagacttgggaaaccttatcggatagcgccgccgtgactatgggaaccggcgtatacaccaccagcatcaaattgtcggcgcagcaggctaaacagcactggcagattgatttgggcgacgtgcgtgaaagcgcacgcgtatatatcaactcacagtttgtaggctgtgcatgggccgtgcccttcatcttggactgtggaaacaccttgcataaaggcaagaacgaaattcgtatcgaagtaactaacctcccggcaaaccgtattgcagaactggaccgtaagggtgtgcagtggagaaaatttaatgaaatcaacgtggtagatatcaattataagaacaccacgtacgcggactggaaaccggtaccgagtggactgaatacgaccgtgaaacttgttcgtgagaacctgtactttcaaggtagtcatcaccatcaccatcactga

SEQ ID NO: 1094 - DNA, 2658 bp, Artificial Sequence
  6xHis UPI000259E388
atggccttgtcgattagtcaggttgccttcgaacatcatcgtacggccttgggcattggcgaaactcaacctcgcgtgtcatggcgttttgatggcaatgtgagtgattgggaacagcgcgcgtatgaaatcgaagtgaaacgcgcgggccatgatgcagatgtcttccgatccgaatcgagtgactctgtgcttgtaccgtggccgagtagtccgttgcagtcaggtgaagaagcaaccgtgcgtgtgcgttcgttcggtagcgacggtcaacacgatacaccctggagcgacgcagtgactgtggaacccggtctgttaactccggatgactggcatgatgccgtggtaatcgcgtcagaccgccctactgaggtagatgccacgcatcgtccaatccaatttcgtaaagagttttcagtcgacgacagctacgtgagcgcgcgcctgtacattactgcattaggactgtacgaagcccgcattaacgaccagcgtgttggtgatcacgtaatggcacctggctggcagagctaccagtatcgtcatgaatacaatacctatgacgtaactgatctcttaaaacaggggccgaatgcgattggtgtgacagtaggcgagggttggtatagcggccgtatcggatatgatggcggaaaacgtaacatctacggtgatacgctggggctgctaagccttttagttgttacgaaaagcgatggctcaaaactctatataccgtcggattcttcctggaagagttcgaccggcccgatcatttcgagtgagatttatgacggcgaggaatatgacagccgtctggaacagaaaggctggtcccaggttggtttcaatagcaccggatggcttggcacacacgaactaagctttccgaaagaacgcttagcgtcgccggacggaccgcctgtgcgtcgagtagcggagcacaagttggcgaacgtgttttctagcgcgagcgggaaaaccgtccttgactttggccagaatttagttgggtggctgagaatccgcgttaaaggcccgaagggtcagactatccgctttgtgcacacagaagttatggaaaacggggaagtcgcaacgcgtcctctgcgtcaagctaaagccaccgaccattttaccctttctggagaaggtgtacaagagtgggaaccgtcatttacttatcatggtttccgatatgtgcaggtggacggctggcctgcagataccccgctagatgaaaatagcgtgaccgcgattgtcgtacatagcgatatggaacgtacaggctacttcgaatgtagtaaccctttgatcagcaagctgcacgaaaatattctgtggagcatgcgcggcaactttttttcgatccctaccgattgcccgcagcgtgacgaacgtttaggctggacaggagatatacacgctttcagccggactgcgaactttatttacgacactgccggtttcctgcgtgcctggcttaaagacgcgcgtagcgagcaactgaaccactcgtattctctcccgtacgtcattccgaacatacacggaaatggagaaaccccaacctccatttggggcgatgcgatagtaggtgtcccctggcagctgtatgaatcttttggtgataaagtcatgctggaggaacagtacggcggtgcgaaggattgggttgacaaagggattgttagaaacgacgtgggcttgtgggaccgttccacgttccagtgggctgactggctagatccaaaggcaccggccgatgatcctggcgacgcgacgaccaacaaatacctggtgtctgatgcgtacctgttgcacagtacggatatgcttgcaaatattagcacgtcactcagcaagggcgaagaggcgagtaactatacggaatggcatgcgaagcttaccaaagaattccaaaaagcctggatcacatcgaatggtacgatggctaacgaaacccagaccggcctggcacttcctctgtactttgacttattcccgagcgcggaacaggctcagtctgcggccaaacgcttggtcaatattattaaacagaacgattataaagtaggcacgggcttcgcaggtactcatctgctgggtcatacgttgtccaagtatggtgagtcagatgcgttctacagtatgttacgccagaccgaagttccttcttggctgtatcaggtggttatgaacggtaccaccacatgggaacgctgggattccatgctgcccaatggtagcattaatcctgggcagatgactagctttaaccactatgccgttggttcggttgggagttggctgcatgaggttattgggggcctgagccctgcggaaccgggctggcgcagaataaatattgaagtagttccgggcggcgatttgcagcaggcttcgaccaaattccttaccccctatggcatggctagtaccaaatggtggctggatggccaggaccagagctgtggcgggttcgactttcatctggtcgcagaagttccgccgaatacccgtgcgaccgttgtgctgccaggcaaagggggggaaaaagtggatgtaggctctggcgttcatgagtatcatgtgcgctgcgtaaagttggagaatttgtacttccaaggtagccaccatcaccatcatcactga

SEQ ID NO: 1095 - DNA, 2367 bp, Artificial Sequence
  6xHis UPI0001A461B6
atgaacagcgcgcccgcgagtcccgcggataccccgagtgcaggagctggtcgaccggcagcccaactgcaagatgcactggccatcaccgcagtcgaagacaccggtcgattaccgcaactggtgcatacggtcacgcttgcgcagccgcgtgatcaggttcgccgcgcagaactgctggccacggcgcacggcctttacgagatgcgtatcgggggtgcaccagccaccgaatcggtcctgaaccctgggtggaccacatacgagcgtcgccttcaggttcagcgcctagatgtgaccgctcaggtgagacaacgtcccgaagggcttgcggccgcggatgcagataggttagacttggaggcgaccctggccgatgggtggtggcgtggtgatttaggctttgatggcggtgtccgatacggagatgacctggcattattagcagccgtggaaattgagtttgctgacggcacacgtcagcgtgtggttaccgatgaaagctggcggagccgtccgtctgcaattatgtctgcaaacatttatcacggccaacacgaggatcggcgcttaggtttgggccctgagacgcctgtgcgcgttgtggaaatagatcggtctacgctggtggagcaagttagtccccctgtactaagacacgaatcacgacgcccggaacgtatatggacctcgccggccggtcgtaccttggtggactttggtcagaatctggttgggtggctgcgctttaccgtaactggtccagaaggcactgaaatcgtccttcgccacgcggaagttttagaggatggcgagttaggcacacgacccctccgtgcggcgcgtgccacggatcgtctcgtattggccggtgatcccgccggggaaacctttgaacctacgtttacctttcatggcttccgttacgcggaaattagcggttggcccggcgaattagccgcggaagacctggaagccgtagtggtgcactcggctctccggagaacaggatggtttgaatgctcacatgccggagtgaaccaactaatctcgaattcactgtggtcacagcgcggcaactttctcagcgtgccaacggattgtccgcagcgtgatgaacgtctcggttggaccggtgatattgcggcgtatgcagcgacggccgcgtttcaacacgacgtgggtgatttcttacacggatggctcctggatctgggtcaggaggcgcgcatgaatcctcacggcattgttccgtttgttgtgccggatctgcttaaacctgggctgggagcgggagatcctgcagccgccgatgaaggttggggtacaccgactgcgatttggggagatgccgcggtgtgggtcgcggaagcactgtggactgcttatggcgaccttgatcgtttgcgggcccattacccagccatggtacgccatctggattcagttgaccgtgcgcttagtccaagtggcttgtgggataccggctttcaatttggcgattggctggatccggatgccccacctgaagcagccgatcgtgccaaggcagataaaggcgtggtagcgacagcgtgtctggttcgctctgctcgttttgcagcgcaggccgcccgtctgcttggcgaagaagtggatgcacggcgctggcaaggcttggccgaacgtacgctagctgcctttaccacagcctatgtgcacgaaaatgggaccattacatcggactgtgcaaccgtttatgcacttgctatcgcctttgacctgcttgatgccggcacccgcccgcgcgcagcagcacgtttagcggaagtagtggccgaggccggccatcgcgtgagcacgggcttcgcaggaaccccttttgtgacttgggcactgagcgaaacggggcacgtagaagaggcttaccgtttactgctagaagaaggatgtccgagttggttatatcctgttagcatgggcgctaccacgatctgggaacggtgggattctatgttgccggacggcagcattaacccgggggaaatgactagtttcaatcactatgcgttaggcgcggttgccgattgggtctaccaagttgttctgggtgtgcgccctgccgcaccaggataccgtcgtatccgcatacagccggttccgggtccggggatcgagtgggcggaaggagcgcacgacagtgcggcgggccgcatcgaggtcagctgggaacatagtgcggacggattacgcggcaccgcgactattccggaaggtgcggaggctgaaattgtgttgcccgatggtcgcgcacgtacggttggtccgggccgccattcatttgaaaatctgtatttccaaggttcgcatcaccaccaccatcactga

SEQ ID NO: 1096 - DNA, 2823 bp, Artificial Sequence
  6xHis UPI00006E4A0D
atgaagaacttcaagaacatacttttgggtctgagcttcctgattacttttatttcgaacggccagattctacctgtgcgtctgacaaccgaaatggcagagaacccacttgcagtgattgagaatcagccgaaattctcgtggcaactgatttccaaagaatccgatgtgagccaggtcgcatatctgatcctggttgcctccagtgaggaaaagctgaacaatgatgatggtgatatttggaattccggccgcgtgaatacggacaagaacctgcatattgtatacagcggtaaacctctgaaatcagaaacgaaatacttctggaaagtaaaagtgtggaatcaactgggcaaaatcagcaagtggagcaaaactgctagcttccgtactgccagcttagagtcagacctgaatccaatctggattggcgcgattaccaaagccgatagccacttaccagaaggccgcaattatcatactgcgacgtttaaccgcgagaaaaaaatgtcgtttattaacgcgagcgacagtcttgcgcgccggtctattatgctgcgcaaacctttcgaagtggaaaaagccgttaaagaggcagtagtttacatttcgggcttaggccactacgaacttaccatcaatggcaagaaagtgggtaattcacagtttgcgccgttatggacggattatgacaagaccgttaactataatgtgtacgagctgagcgcaaaagagtttcagaagggcgacaatgttattggcgttctgctgggcaatggcatgtacaacaccctggccgaacgttataccaaattcttcgtctcgtttggccctccgacgctgtttttcaaaatgaaaattaagtacaacgatggttcggaagaaattattaagtccgaccgcacctggaaatatagcaaatcaccaattacttacaatagcatctttggtggcgaggactacaatgccaatttagagcagaaagattggaaccgtaaagggtttaaggatcgtgattggaaaaaagttgtgatccaggaagcacctaagggaatcctgcgcccccagaccgctccaccggtcaccattcagaaacaatatgaggtaaagaccgtgaaagagctgaaaccgaacttctacgtttttgatatgggccaaaacttaagcggcttcccgacaattaaggttaagggtaaacgtggacaaacgattcgggtatgggtggccgaaggattgaacgaagaagggacaattgcgcagggccgctccgggaaaccgtattactacgattatactctgaaaggcaaggatgtggaagagtggacccctaaattctcattctacggctatcagtacgttcagattgagaatattaactacaaggaagataagaacaaggaatttccgaccctggtcgatctgaaaagcaattttatctacaactccgcgggagaagcgggtagctttgcgtgctcgaatgaaattttcaataaaacccatgaactgattaacaactcgatcaagtctaacttccagtctgtcttcaccgattgcccgcagcgtgaaaaattgggttggttagaggaaatccaactgaatgggccttctttaatgttcaactataacttgcagacttttctgccggcgaccatgcagaacattagcgactcacagcgcgagaatggcttgattccgactatcgtcccggaatatgtgatcttcggcggtgactttaccgacagtccagaatggggggttaccggcgtgattctgccgtggatgtattatgagtattacggagacgcaagcctgcttgagaagtactttcccgtgatgaaaaactatgtggattacctgggtacaaaagcaacgaatcacattgttagtcacggcctgggtgattggtatgattacggcacccacccggcgggatattcaaaaaactccccgattgcattaagtgcgacgagccattactactatggcgcgtttctggtggcaaaagcaagcaagctgcttggtaagaccgaggactttgagaaatataacacgttggcgtcagagatcaaaaccgcattcaacgcagccttttttaatgaggaaacaaaacagtatggtaccagcagccagttttctaatgcggtcccgatctttatggatatagtcgaaccacagtataaagaagccgtgatgcagaatctgcttgcagatatcaaagagaaaggcgatcgcttaacaacaggcgacgtaggcaaccgctatctgttccagactctggcgcggaacggcgaaaacgaaaccatgtaccgcatgcacaaccattacgacgccccgggttatggcttccagattaaatttggtctgaccacactgaccgagcagtgggatccccgtaagggtaacagctggaaccattttatgcttggccagattgaggaatggttctatcagtcgctggcagggattatgtctgatccggaaaaaccgggttttaaacacttttttattcagccggaagttgtaggcgatatgacctttgccaaagcggattatcagagcgtgtatgggaaaattgcgagcagttgggagaagaaggatggtaaatttattctgaccgttcaaataccggtcaacaccactgccaccattaaattacccgtcgctaagaatagcgagattaaaatggatggcaaacgcgtgcgcgcggggtttgatgagaaagcccagaaaccggtgttagaactaggtagcggcatttatactattgagtgcacaattgaaaacttatattttcagggatcacatcaccaccaccatcactga

SEQ ID NO: 1097 - DNA, 2700 bp, Artificial Sequence
  6xHis UPI000245C507
atgcccgccgtcatccggctgaccctaaaccaagaatcagcgttaagcggagtgcaacagcttccagttctgggctgggaaattgagtcgcgcaaccgtaatgttcgccagaccgcatacaggctgcaaatttcgcaggatcaggacttcgataatatcttactgcgcggtgaatggcaggaatcagagtgctcgaataatattccgttgaccgagctcatgctgaccagctcccagcactactttattcgcgttcaggtgcgtgataattatggggaaaccagcggttggagcagtccggcgcagatgattaccggcgttctgtacccccatgaatggctggcggacttcattaccgccgaaacctcagcagataaagataactcacacgccacgctgttgagaaaaagcttcgtgctgaaccgagcgcaggatattcagtcagcgtttatccatgtaagcgcgctcggcctgtacgaactatatctgaatggacataaagcaggggaagatgcgctgacacctggatggaccagttatcacaaccatttgctctatcagacttatgatgtaacgggtcatctcgaaaaaggggagaatgttattggtgcgattctgggtgccggctggtataaaggcgatatgggatttagccgccatcggaattactacggtgaacgtagcgcactgattagtcagttagtcattaactacaacgatggctctcaggaaatagtgatcagtgatgagtcttggaagggccaagattcggccattctcttcagcgagatctacgatggcgagatttacgatgctcgtcgagaaatcccgggctggtgcaccaaagacgtgtcaggcgagggttggcgccccgtaagcttggtgacccacgaaaaatcaactctggtggcgcaaggcagtaatacagtccgtaagatggcggagatcaaacctgttgccctgatcacgacacctcaaggtgataccgtgatcgacttcggccaaaatctgagcggctgggtagaattccgcgtgtctggcaaagcgggtgatgaagtggtgctgcgccattttgaagtgctggatgccgatggaaatgtgtatctggacaacttgcggactgcgcgccagcgtacggcctacgtgcttaaaggagaaggcgaagaaatttggcatccgcatttcacgtggcaaggttttcgcttcgttaaagttgaagagtaccccggacagtgggacctaaataatttcacggcaattgtgctgcattcagcgatggagcagaccggtcactttgcatgtagtaaccctcagctcaaccaattgcaccataacatcctctggggcttaaaagggaactttgtcgacgtgcccacagattgcccccagcgtgatgaacgtttaggctggaccggagacgcccaaattttctgcaggacggcgagttacctgatgcaaacgcgcaattttttcgccaaatggctgaccgacttgcgctacgaccagacccccgaaggcggcgtgccgcatgtaatccctgatattttaaccgggtattgcgggaaagatcgtttgctgtctgaagggggtacccactcagcctcagcatgggctgatgcggccgtcatcaatccatggaccatgtatctgatgtacggcgatacctgtgtcctggaaaatcagtatgcctcgatgaaaggttggatcgattttatgacggctcatgccgagaaccatatttggcactataagcttcaatttggagattgggttgcgttagacgcaaaagagggcagctattttggcgccacccctaacgatctgacctgtactgcatactacgcttattccacacagctgttcgctaaggcagccaaggtgctgaatcgtactgaggattacgatcactaccatgctctgtaccaggctattgttcggcgttttcaggaagcgttttttactccgagtggtcagctggcggcgcgtactcaaacggcacatattttagccctgtatttcaatctagtgcccgacgaatttcggcagcgcacgaccgataccctcgttgaactgttaaacgaacatgatggccacctggttaccggttttgtaggaaccccgtatttttgtcacgcgctgtctcagaacggtcgtacgaaagaagcctggaatctgttactgaaagaagatttcccttcatggttatatcaggtgaaagccggagcaaccaccgtgtgggaacattgggatggtattaaaccagatggttcaatgtggagcgcggatatgaattcgttcaatcattatgcgtatggcgccgtgggcgaatggctttatcgtgtcgcagctggcatcgaagcggatgaggctcagcctgggtttaaacattttatcattaagcccctgacgggcggcggcttaagctggctggatacccgctatcagtcaatttacggagcaattggagtccgttgggaagtgtcaggtcaaacggtctttctgaatgtcactgtgccggcgaacacatctgccaccgttgttttaaccgatggccagtctgtacaggaggccgacggaatcgattttgcgcgctgtgcggaaggttacaccgcggaagtgggttctggtgagtatcgcattgaataccgtcttgttgaaaacctctattttcaggggtcacaccatcaccatcaccattga

SEQ ID NO: 1098 - DNA, 2706 bp, Artificial Sequence
  6xHis UPI0003E4E711
atggagactcaggtgattaaaccgattgccgtgggtgacctgcaaataacgcgttttaccattgaacatttccctggtgatgccttaggcattccaaccgctaccccgcgcatgaattggacgtatagccgcgcagtgcctgacggctcccaaatactgcttaaaattagtcgacgtgtgccgggtagccctgctaaagaagaatgtacatatctgccgcctgaagataacgtgttagtaccgtggcaatttaccccgttggcgtcgcgtgaagaggtctttgcaacagtgcagcttgtttcagcagcgcacaaacccttgtcggatccgtcagcgaccttgcatttcgaagctggtcttatgcaggaatacgaacacgtagcagactttgtggggccgtcgtgggccgaaccggaaaccgaccaccgtcatctcccgttaattcggaccgaaattgcgattaaagcgaaacctaaacgtgcgcgactgtatctgtcggcccttgggttagtagaagcagaaattaacggtgttaaaatcggcaatgatgcgttaatccccggctggacgaactacgaacagagagttcagtgttggacctacgatgttaccggtgagctaaacgagggtgcgaatgcaatgggcttttggctgggagatggatggtatcgtggaaggctggggttcgacggcgggtacgtgaactattatggcgatcgtctgggcgtgtttgctcagctggaggttgaatatgaagatggggggattgaacacgtgtacagtaacgcatgggaccgtcagtggaaagcatcactgggccctattgtttgcagtgatctatgcgaaggtgaacgttatgatgcacgcttggaacaaccaggttggagcgaaccgggattcgatgattcctcttggaaaccggtcgcggaaattttctacgaccctgcaaaaatcgaaaaccctgatacatcgcctgtacgcgcccaggaaatcaatgaacctgtgagcattacacgtacgggcgatacgcccgacggtcgtggcatctggctggtggatttcggacaaaactgcacgcagcgtattcacctccatgtgaaaggcctggaagccggccagtccgtggaactgcatcatgtcgaagtcctggaacccaacggtgagattgctacccgcacgttacggcgcggtcagcagcatgatatttacactagcaatggcactgatgcttggtgggaaccgcggtttgcaatgcatggctttcgctatgcacagatcgaaggcgttgctggtgaattgacggccgcggatatcgaatgccatgtataccatagtgtcatggatcgtgccggcgagctggagacatcaaatcctctccttaaccgcctgcatgcaaacgcactgtggagcatgcgctcgaatttcgtgagcgtgccgcaggattgtccgcagcgggatgagcgaatgggctggactggcgatatatgcctgtttgcgccaaccgcagcctacctttatgacgtatatggcttcctgaaaagctggctgaaagatgtccgggccgatcaagttaaatggggaacggttccattttacgtgccgttcatcccgttaggcggctgggcgcatccgcaggcaattagcacgtggggagattccgcagtagaggtgccctgggtgctttatatggagagcggtgatccacagattctggcggactcttatgacctgagccgtgattggattgatgaagttgccggttatttatctcctgatggagtgtgggaccgccgccctgactatgtattaggccagctaggggattggcttgaccctacggctccaccggatgatcctactcaagcgatgaccgaaaaagagctggtggcgaccgccttctttgcccgcagctgtgcacaagcagaacaaatcgcgcggattttaggtaacaatgaagacgcagtacggtttggagacctgcgccgtcacgtaaccagcggctttttggcgcgcttcactaatcttgacggcaccatgacttctgacactcaatgtgcgtacgcgttagcgattgcctttggtttgttggatggcgagcctgtccgacgcgtgaaggcgggtaatcgcctggcgaagctggtgcgtgagagtggaggcaaagtcagcaccgggtttgcaggcaccccgtttgtgttgccggcgttaaccatgaccgggcacaacgaagaagcgtatggtctgctcctgagcgaggagtgcccgtcctggttatatcaggtaaaaatgggtgcaaccactacgtgggaacgttgggatagcatgagaccggacggcagcctgaatcctggtggcatgacgtcgtttaaccattatgcgctaggctcggttgccgagtggatgcatgcccatatcggtggtctggaagcgattgaagccggttggaaacgctttcgcgtcgctccagttattgggggaggactggatcacgcgtccacaagccacgttacgccgtacggtaaagcgagtgttgcatggaaaaccagcgccgaaggggttgagctggacgtaacagttccgattggggccactgcggtagtcgaactgccagatcatgaaccgactgagctggcaggtggtacccatcacttggtggtagcattggaaaatctttacttccaaggctcacatcatcatcatcaccactga

SEQ ID NO: 1099 - DNA, 2379 bp, Artificial Sequence
  6xHis UPI000353BD9F
atgactaaaaaatggcaggccacatggatcgaaccgcagcaggagccgacccgaaaagaacccccgttcagtctggcggacatgtttagtgggaagaaagtggtgcaggatccacccgaggaacgcttacttccgccgcattaccttaagaaaatctttacggtcgaaaacaaaagtatcaaacaagcgtcgcttacgatgactgcacacgggatctaccaggcaaaaattaacggccaggccgtatctgaggccattttcgctccggattacacgtcctatacacagtacttacagtatcagacctatgatgtgacccacatgctgaaagaaaaaaatgtgtggagcgtgactttggcggatggttggtacgcgggccgtgtctcagtgtccggtggaagtgcgcagtttggggatcgcctgggcatcctgggcgaaatcgaaatttattacaccgacggcacctacgaaatcattgtaaccgacgaagattttgtgagcagccacgggaagtacgtttactccgacctgtttattggcgagaagcaggatttgcgtctcgaaaaggagaattgggaaacggatttcgacctgaccggttttaccaaagtgtccaaggcggattatggctttgatcacctcacaccgcaacgtggtccgcaagttaaacgccaggaaaaactcgcagccaagtcgatttggtgggagaaagatgcagttatcgtggactttgggcaggtgattgctggtcgtgtccagctgcagattccactggctgatggacaagaaattaccattgagcacagcgaggttctggaccgtgaaggccacttcttcaataacatcgtgggtcgcaacaaagatcagaaagacgtgttcattggcaacggtcgcgaagcctgtctggagccggatttcaccttccacggttttcgctatattaagattgatggcctggacgttctgccggacaaacaatcggtctgggcctacgctatctatagtgacatgaaagccaccggttcgtttacaacgagcaaccagaaaattaaccagctcattgaaaacattcagtggtcacagaaaggtaatatgcttagcattcccactgactgtccccagagggagcgcgtagggtggactggtgatatccaggtttttggcccgaccgccaccttttttatggatgtgtacgatttcctgggtcgttggttagacaacgttcgtcttgaacaacaagcagatggccagattgttgactacaccccggcgccgcgcgattattttgaaggcgaatcattgaccggctcgctgtcctcggccggctggggcgatgccattgtactgttaccgtggaccttgtatcagcgctatggcaaactggaaattctggtggaaaattatcaggcgatgaaaagatggctgagctttagccgtaagtcggctgctggcgataaaaccgatgataaacagtacctgtgggacaccaaattccattttggcgactggatgtttccgtcattcatgattggtgaagacgctaaaggaccgatggagaccgccttcgttaccaaggatctctttggtacggcgttcttggcccattcaagccagctgttcgcccaaatctcacagttacttgacgaagaagaagaaaactggagtgacttcagcaacaaagtgaaagcagcgtttcagaaatattactggcgcgatgaccatctgacggcagacttccaaggctcgtacgtgattgccctggcattcgatctgctggatgagaccgcttcgaaagcggcagccgcccgtctgactgaactgattatcgcaaataactattgtctagatacggggtttttaagtattccatatttgctcgatgtgttatgcgactatggctatcaggaactcgccctcaaactgctgcttcaggaagaatgcccgtcatggttatatgaagtaaaccacggcgcaaccaccatctgggagagttgggccagcatccaaccggatggaacggtttgcgatttttcgttcaaccactatgcatttggctgtgtcggagactggttggttcgccgactggcggggctgcaggtcaccgaacctggctttacatttttcacgatctcgccgctcgaacagaccgcaattagttcatatcatctgaactataccaccgcctacggcgatatagaaattgagcgcagcaatgatcagttccacctgagtgtaccgcagaacaccaaagcgattttccaatatggcgaaacctcaaaagtgcttaccagcggcaaacatcaccttacgattaaaggagagaagatttatgaagagaatctgtatttccaaggtagccaccatcatcatcatcattga

SEQ ID NO: 1100 - DNA, 2742 bp, Artificial Sequence
  6xHis UPI0001789C0D
atggccgcaattaaagcgaccgacctgcgaactgaaggaattctcaatccgtttggtctggatgcggaacgcccgcgtctatcatggtcttttggccagccggccggggcgggatcagggcagagcgcgtatcgtattgcagtagcctcgtctgaggaacgtttgaagcttggtgaaccggatgtatgggacagtggaattgtgcgctcgtgcgagcacgtgagcattccgtatgaaggtgcatctcttatgccgcgccgcagatattactggcacgttacggcctgggacggtcaagggcaaccggcagtgtccaaagcagcgtggtgggaaacaggactgcttgcggaagcaaaatggagcgaacgttggatcggcgatgcagcggaagccgcggaccgtggacccatgattcagctgcgtaaaagctttgaagttaagaaaccggtcgcacgcgcgagggcgtatgttaccggtctaggccattacgaactgcgattaaacggcgccaaagtcggtgatcgccaactcgaaccgggttggaccaactatgataagaccgtgctgtattcggtttacgatgtaacaccgggcctgcgccaaggcgaaaacgccgtgggcgtcctgttaggcaatggcttctatcgcgtggctggcggccgttatgccaaatttaaaggcagctttggcaatccgaaatgccttgctgaactggttattgaatacgccgacgggacggcggagaccatcgtgaccgatggtacgtggagcttatcggatagtcccctcacctttagctgtatttacggcggtgaagattatgatgccggcctggaacgtactggctgggatggacccgggtttgtggaggatggtgactggcgtcgtgcgtgcgaattggaaccgcccccgggcaaacttacggcccagagttccccgccgttagctattaccaaacgcttacctgcgcgctccgtgagtgagccacgtcggggcgtctatgtatacgatttaggtcaaaactttagcggttggccgtgcattcgtgtttctggccccaacggtactcgtgtaaagctcaaacccgcggagctgttgaccgaagaaggactggcgaatcagaaatattcgggttccccctacgaattaaactacgtgctgaaaggcgagggtattgaagaatggcatcctcgttttacttactatggctttcgctatgttcaagtggaaggcgcggcgcccgctggtgaaggtgtggaggaaagcgatctccccgtgctgcatggactggagggtcacatgatcggcccggacgttgaagacgctggtggttttcgctgctcagatcccctgctgaatcgcatccacgaaattattaactgggcgatcctgagtaacatgaaaagtgtctttacggactgtccccatcgcgaaaaactgggttggctagagcagctgcacctgatgggtccgagtgtcatgttcaattacgagtgtgaagcgcttttggagaaaataatgcgtgatatgagcgatgcgcagcttccgaacggcatggtgcctaccactgccccggaatacgtcgtgtttgaagagccttggcatatgtttagggatgcggcggcttggggtggttcatacattctcttagcatgggaaatgctccgccgatacggcagcgttggcactcttgaacgtcactatgagggcatgggcagatatgtacactatctcaccgaggcgtcggatggcttcatcctgcgcggcggtttaggcgactggtacgatattggcccgaaaggcccgggattcgcacaaaatacctcagtagccttggtggagaccgcgatctttttcggacttgcacgcgccctgggcgaaattgcgctggtgctgggcaaagcagaagatgctagcgcacattcccgtctgtctgaaagcatccgtaccgcatttcattcggccttctacgacaccgcaaatgcaatgtacgcggaggggtcagacacggctattgcaatgccgctggccattggtctggcaccggaagaactgaggggtgtactgctcgatcgcctggtgcgtaacattggcgaacgcggttggcagacaacggcaggcgatgtaggtcatcgttacgtgttgagcgcccttgcctcgggcggccggtcagacgtagttggaaaaatggcacgcaatccgcatgcgccgggatatgcctatcaggtggcgcatggcgccacatcattgactgaggcgtgggatggtccgacagtgggcaaatcccaaaaccactttatgctgggccatctggaagagtggttgtacgcgagcctggccggactagattatcgctaccgtcccgaggtaggccgctatcttgtgaaggccaaaccgaccgtggtacagggcgttgagtgggcggaagcgtggcagcagctacgctctggtcgtgccagcgtacgttgggaacttggtccgtcaaaccaaatgacggtgcgcgtagacattccagccaactctgaaggcttgatccgaatccccagcagcccggataccccggttttagcatcgggccctgatgttgcctacgaaggccatgaagatggccatgcagtttatcgtagcggtccgggctcatactgctttaccttcgccgcaaatcaccgtactacggaaatggaacgcgaacgtatggaaaatctgtattttcaaggtagccaccatcaccaccaccactga

SEQ ID NO: 1101 - DNA, 2658 bp, Artificial Sequence
  6xHis UPI000260A2FE
atgagcgatcccaccgtcacagtggtgcgtttgcgtacggacgatgattcgggactgactgctaccgccaacgccactcctcgattgagctggtcgttggccgccgaccgttctggtgtgttgcaacgcggctatgaagtgcaggttgcaccggatcccggattcgcggatcctgtctcttccggcgaggttgatagcgacgttgttgtagaccatgactggcctgcagcgccgctgacaagccgtcaggtggcatattggcgtgtgcgtgttcgcacagatcagggctggactgcctggggcgaacctgcgtgcgttgaagcagcactgttggaggatgcagattggacggcacgcccagtttttctggcgggcgatcgcggacgcgatggggttggtccggccccgcttttacgccgcgagtttgaactgccagcggaaccggtatccgcccgcttatatctgacggccttgggtgtgcaccgtactaccttaaatggccgtccggtgggcgacgagctactagaaccgggttggacttcttatcgcgatcgtcttctatacgctacccacgatgtgaccgccctcctccgtgcgggccgtaatgttctcgcgggttcggtgggggatgggtggttccgcggcaatctgggttgggaccgactccgcgacttttatggagatgcgagtgcactactggcccaactggaagtacgctgcgcggatggtagtaccgttaccgttagcaccgacgaacactggcgcggaggctacggcgcagtgcgtgcggcggatctttacgatgggtgcgatattgatttgcgcgaagaacctgtgggctgggccgaggctggctttgatgatgccggctgggaacctgttggtaccttacctttaccggccggcctgtcccaacgtgcgctgcctccggtgcgtgtgctgcaggagattgaaccgcaggtttcagagctgtcggacggaactttggccgtggacgcaggccaaaatgtgactggttggttgcgcttgagagtaaccggcccctcaggcgcacgcgttactgtgcggcacgcagaagtgttggacgaaaaaggaaggctagttaccaccctcttgcgttctgcgcgtgcgaccgacaccgttgtgctggcaggcggcacggcggacttggaaccggaatttacgtttcatggctttcggtatgcggaggtagaagtcccgccgggcgtcaccgtagatgcagtacgcgtcgcagtggtggcctctgatttacgtcgcactggtcaattctcctgctcaaaccctcgcgtagaccagctttttagcaatgtcatttggagtcagcgtgacaatttcctgagcattcccaccgattgcccgcagcgcgatgaacgcttaggctggacgggtgatattatggcctttgcacccacggcggccgccaattttgattcacgcgcgtttcttgactcatggctgacggatgtcggcatcgaacagctgccttccggcggcgttcctatggttgtgccgaactgtctcaccggcgagtttcccagtcctctgccgcaagccgatggcgcagcaggctgggccgacgccgtgaccgtcgtacccgcggccttgtttcgcgcacatggttcgcgtgacttactccgacgccatgtgggcagtatgcagcgttgggtagattacgtggctggccttttagccgaagatgggacttggtcgggctacttgcagctgggcgactggctcgatccgaacgccccgcctgagcgcccattcgaagcggtaacagatcgtgattatgtggcgaccgtattcgtcgcgcatagtgcgcgcttattagcggctacgtgccgcgaattggggcgtggcccggatgccgatcgctatgcagcattgggtgaccgtgtagcgcaagcggcgtgggcaaaatgggcagatctggcccctacgacgcagactggctgtgcattggccattgtatttggctcagcaccagacgcggaattaccagcgcttggggatgctctggcaggcctggtgcgtgcatcgggaggtcgcatcggcactggcttcttagggaccccgttcgtactcccggctctcaccgcgactgggcatctagccgaggcctaccaactgttgttgaatgaggaatgcccggggtggttatatcaaattcgtcatggcgccactacaatgtgggagcgctgggatggtattctcgcagacggctcagttcaccctggtcaaatggcagatggcagtaccatgagtagcttcaaccattatgcatacggcgcggttgcaagctggctgtatgaaagtgttgccggtttatctccggcagcccctggctatcgcgaagtgctggtggcgccgcagccgggtggtggactgacccgtgcggcagcgagcattgaaacagagtatggcccggcctcagtcggctggtcgaccgacggggcgaccctgacggttgatgtgactttaccaccgggcactaccgggcgtttcgcggttccggcagggtggagcccgcagcagccggtagcgctgcttggctcaggacagcatactttactgctgaccggggccggggcggaaaatttatacttccagggttcacatcaccatcatcatcactga

SEQ ID NO: 1102 - DNA, 3192 bp, Artificial Sequence
  6xHis UPI00019EF0EE
atgcaaaagaatctggaacagagttttaaagtgacccctgacaccatccaaacgagtgtttattggtactggatgtcagacaacattagcaaagacggtgtcgttaaggatttgtatgcgatgaaatctgcagggatcaatcgcgcgtttatcggcaatattggctatgaaaccacgccttacggcaaggtgaagctgttttccgcggaatggtgggacattatgcatacggcgcttaaaactgcgacgaacctgaacattgagattggcgtgtttaacagtccgggctggtcccagtcgggcggtccgtgggttaaaccggcacaagccatgcgctatctcgccagtactaaggccaactttgtgggtccaaaacagttgaacgtgcaactggaaaaaccaaaggggtactttcaagacgtccgtgtgatagcgtataaaacccctaaagcttatggcaatagcatagcagtgcacaaaccgaaactgagctcaagcattagcgtgcagaacatcaacaacctgattgacggtagcgaaaacaccacggtggacataccagcgaccgagagtattacaatcgacctcgagaccagctctagtttcacggcgcgtagtctcgtggtttatcctgcgcataaaggcctgaacgtgaacgtcgaactccaagttaaaaaaaataaggaatatgtctctgtcaaaacttttagcgtgaaccgcaccaacagtaacctgcacgtaggcttcaagccatacggtccggtagcagtctcgattcctccgaccatcggtcactcatttcggctcgtgtttggtaagtcaggcggtttcggtctggccgaggttgtcctgagccagacgcccgttgtagagagctataccgagaaaacccttgccaaaatgttccagtcgccgctgccgtattggaacgaatatcagtggcctgaccaaccactaattgacgacctgagtctggttattgatcctaaaaccgtgattgacatcaccacctttatgaatgcggaaggtcagctgaaatgggacttaccggctggcaattggacaatcatgcgcaccggtatgctgcccaccggtgtcaagaatggtccggcctctccggaaggaaccggtctggaaattgacaaaatgtcaaaagaacacgttgcgaatcatttcgatgcgtttatgggtgaacttctccgacgtatcccggccgctgatcgaaaaacttggaaagtggtagttcaagatagctatgagacgggcggccaaaactggaccgatgatatgatagaaaaatttaaggcgtcatttcattacgatccactcccctatctgccggtcattcagggggaagtggtgggtgatcagaatcaatcggatcgtttcctatgggatctgcggcgctttattgcagaccgagttgcgtatgattatgttggtggtctgcgtgacatctcacacaaacacggcttaacgacctggctcgaaaattatggccattggggcttcccgggtgagtttttacagtacggtggccagagtgacgaaatcgggggcgaattctggagcgagggcgagctgggtaatatagaaaaccgcgccgcaagtagtgcggcacacatttatggcaagaccaaggtctcggccgaaagttttacagccggcgacaaaccgtatcagcgctacccgtatattatgaaacagcgtggcgatcgttttttcacagaaggcattaacaataccctgttacacctgttcatccagcagccttcggaagacaaagtgccgggtattaatgctaatttcggtaacgaattcaaccgccacaatacctggttcagctacatcgacctgttcaccggttatctcaaacgtaccaactttatgctgcaacagggcaaatatgtagcagatgtggcatattttattggggaagacgccccgaaaatgacgggcattaccgacccggcgctcccggcaggttattcatttgattacattaacgccgaagtgattcagacccgtatgaaggtcaaagatggtcgtatggttctgccggatggcatgtcttataaactgctggtgctgccaaagctgaagaccatgcgcccagagctactggccaaaattaaggaattagttgcccagggcgccaatatcctggggccagctccggagcgtagccccagcctagcgaactttccggaggccgatgccaaagtaaaacgcatggtgaccgagctgtggggaaatgtgaacggcacgaccattaagacgcgtaaattgggcaaaggcacgatcatgtctgggatggacatgaaacttgcgctgaacgcgctcaacatcctcccggatttcaagacaaataccaccgaccccgtgttgtttattcatcgtagcggtccgcaggccgagttgtatttcattagtaatcaaagcgaaaaacagattactttttcgccgacattccgttctgttgacatgcaaccggaactttgggatccggttaccggcaaaaccagagttctttctgaattaagtgcgaatggatcgagcacgacaatcccattgaccctggagccactgcagtctatcttcgtagtatttcggaacccgctcgttgcgtcacctatccgcgcgatcaacttcccagaggcaaaaacaatcgaagaaattaacgggccgtggaaggtaacctttaattctcagatgcgcggcccggagaaaccggttatgtttgatacgctgattgattggacgaagcgccctgaagaaagtatcaaatactatgcgggcaccgctgtgtattccaactcgttccgggccaccaaacccgtaaaaggggaacgcatctatttatatttttctgaagtgtcggtcatggccaaggtaaaagtcaatggtaccgatgtgggcggcatgtggacagcgccgtggcgtgtggatattaccgatgcgattatttcgggcgtgaatacgctggatatttcagtcgttaataactgggttaaccgcttagttggggactcaaaattgccggaagcaaaacgcaaaacctggacgaacaacaatccatatactccagattccaagctggttccgtcgggcctcacgggtaaggtcgtcgtaaagaccatcaagtatgagaatctgtattttcaaggttcacaccatcaccatcatcattga

SEQ ID NO: 1103 - DNA, 2928 bp, Artificial Sequence
  6xHis UPI00019B5915
atgtttaaaatcttgcgcccaattggttttttagccgctctgctgctgctcaccggcgaaatggtaatgggtcagaaatccacgcaaattattagcccttcggtgtttcaaaacccgccgtcaacttatggtatccgttgctggtggtggtggctgaacggcaacgtggacaaagaggtaatcacccgtgatcttgaagaaatgaaggccaaaggctttagtggcgcctgtttatttgatgcaggaggtgcagaacagcgtggtaatgctcaggtgccggctggcccaatgttcggcagcccgcaatggcgggaattatatatccacgccatgcgcgaagccgaccgtcttggactagtcatgagtatgtcaatccaaagcggctggaacctcggtggaccagatatcaccgcagaggaatccgcaaaacaggttgctttctcacaggtgcaagtgaaaggcaacacgcgaatcagccaagaactgccgatgccaaaaactcaccacgacttttatcgtgacatcgttgtgttagctattccaacgaaagtgttcgcgaatcgtccccccattcgcgatttcgaaaacaaagccgccacacgcgaggtgggcgcgagtgttccggagacgaggcctttgctcacagacatccctggaaccccgggagaagaagatgcgtcgaaaaagcaagtattgaatattaccagacatttcaaaaatggcaaactagaatggcgcgcccccgctggcgagtggactgtcttgcgttttgggtacaccgccacagatgcagaagtatcaacttctagcggtgattggcagggcttagtgattgactatatgagtgaaaaagcctttaaccgctattgggatacgaacgttgaaccgctgctgaaagcgattggcccactggcaggcaaaactctgcgttatctgcagacggatagctttgaagcaggcggcatgaattggacggacggatttgaaaaagagtttattaagcaccgtggctatgatccaattccgtaccttccggttttggccggtaaaatcattgatagccgggaagtgtcaaatcgttttctcagcgacctgcggaagacccttgcggaccttatagccgaaaaacactacggtgtgtttagcaaacgctctgcagcatacggtatcggcattcagccggagagtgcggggccgcatgctggtccgttcgatggcttaaaaaactatggctactcagaaattatgatgagcgaattctggagtcctagcccgcatcgccctcgccctattgaccgtttcttcgtgaaacaagcagggtccgcggcaaaaatacataataagaaactggttggtgcggaaagttttacgaccatcggcccgcattggaatgatgtgatgtggagcgatatgaaacctagtgtggatcacgaattctcggcgggcctgaatctggtgtatctgcatacgttcacggcaagcccgaaggcgatgggtatcccaggtcaagaatattttgctggcactcacttcaacccgaatgtaacgtggtggaaccagagcaccgcgtttattcagtatctgacccgttgccagtatctgctgcaatccggaacctcagtcgcagatgtcttatactattatggggatcacagtcccaacttgggccgcctgaaagaggatgatccagcgaaggccttaccgggcttcgattatgacctcatcaacgaagatcgtctgatggaacttcaagcaaaagacggcaaaatttttctgccgcatggtgtgtcctatcgcgtgctggttctgcccgaccacaaaaccctgagtctcaaagcgcttcagaaagttgaagctttggttaaagagggtgccagtgtgatcggctcaaaaacggttaccacagcgtcgctggtgaaatacccggccagtgaacagacagtgagacagattgcggacggcctatgggggaccgggaatgaggcgacgggtagtcgtaatgttggcaaaggtaccattgcctggggcattacagctgcggacttcctgcgcagtaaaggagttcattttgatatggaaattaccgcccgagaaaccggttcgcgttatgattacattcatcgcgaagatacgggtgccgatttttatttcattagttctcagaaccgtgcggcgtccaaaatgaccgccgcgtttcgcatgacaggcaaacagccggaactgtggaaccctgtaaccggtgagaccaggccggccacctcattttatcagaaggacgggaaaacctacatcccgttagagtttgatccgtatggttcagtgtttgtagttttccgcgacgacattgcgaaggatcagaatggttcagccgcctctaactttgtgcatcttgaaacagcgaccactttgcatggaagctgggatgttgccttcgaccctgcatggggaggtccggcggcagtcgtctttaatgaactggtgtcttggcctgatcgcaatgaggagggcatcaagtattatagtggcaaagcagtgtatagcaaaaagttcgatgcgagccaagacgtggcggagagcaaacaggtgtttctggatcttggcgaagtgaaggatatcggtattgccaaagttaccctgaatggtaaagatttgggaattctgtgggcaccgcccttacgagtcccggtgggtggcgttctaaaagagaaggacaacgtgctccagattgaagttgtgaacacttggcgtaataggcttattggcgatcgcactaagccggtggagaaacgcttcaccaagactaacgtcaaagtgctcgaaacctggcaactcactccgagtggtttactgggtccggtgcgcctgctgaccggcagtgagcaagaaaatctgtatttccaaggcagtcatcaccatcaccatcactga

SEQ ID NO: 1104 - DNA, 2442 bp, Artificial Sequence
  6xHis UPI000212C156
atggaagaaaaccgcctctggaatgcccgctggatctggcatcagtcgtatccctggaccagcgatccgggtacccatgaaatggtttggttccgtcgcgaattcgatgtgacggatcctcacttagcacagttggtcgttgatatttccgcggactcaagataccgtttgtttttgaatggtgattctgtgtcagtagggccgtgcaaaggagaccgcagcacacactactatgaaacggtggatctgagcgaacgcctaattgctggtactaatgttctggccgcgcaggtgctgcattttgcaccgtccggacctcatcttctgggcgtgtcgggccccctctcgattcaccgcgccgtaagcggcgccatgtttcttgagggcgttctgatcgaaggcaacggccatagtcagaccctgcattccgatgagaaatggttatgtaagaaaatgcctggcttcaaactggtgccgagcccgattattttctttcttggcggctttgaagacacggatggctcaggtttagatcatggctgggaacttcccggatatgatgacgaaggttggactaatgccgttattgtgtgcgaaacgggcgacaaatttggacaattaaccccgtggcaattggctccgcgtccgataccaccgatgcgcgaagaacctgcgtcatttcgtgggatcacaaaagccgacgatcgcgcggcaattcctggctacgaagcgatgttacgcggaggcgatacccgctcagttcgagtggaagctggtcaatcaatttggctggaattagatgcgggcgagctagtgacaggctatgttacactgaaacttcgcggcggccgtgagtcgcgtatcaagctgttatatgctgaatcgtatgaagaaccggcgtctaacttacatcaccgtgtgaaaggcatccgcgatgatgccgagaatggcatccttttaggcgaagccgatcactacaccgttgctggggtgggcattggagaatcagttgaacgctatgaaccgtttgatttccgtacgtttcgctacttacgtctggaagcggcggcgaaagatgagcctttagaaatcgtgctcctgagctaccgcgataccggctatcctcttaatgcacaagcagccttctcctgttcagacccggattacgctgcgctgtgggaactgtctttgaaaaccctgcgacgctgcatgcatgaaacttacgaggactgtccgtattatgaacagctgcagtatacgatggacacccgtctgcaaatgatgtttacgtacgctgtgagtgccgatgatcgtctggcccgtcgcgccttattcgattatcatagcagcgcgctccctagtggcatgcttcagtcgcgctatcctagcgagtatcgccaggtgatcccgtcattttctctgtactggatccacatgctttacgaacactattggcatttcggtgatcgcgagttgattcgtcgttacgtcccgactatgacgggcgtcctgggatggtttcgccgtatgctgacgcctgaaggtctggtggcgccgacacctcgcgcgtactggccatactttgattggtgcatagattgggaaaacggaaccccgccggcacatgccaaaggccctttaacgttattaagccagatgttagcagcagcgttacagaccgcatcgcaaatatatgaagctgttggatggtcggatgcagcacgtgaagcaaaagcggacgcgaatgctgtaaatgaagcgttacttcgtctgtgttggcgcccggagcgtggcctgtttgcagatggccctgaagtcgaagaattctcccagcatgcccaagtatggggtgtggtttgtggcgcggtacagggggaagacgccgtacgcctattagaaaggaccatcgagccccaggccgaacatatggcgcagttaagcgttccagcgtcttacgaactctttcggatgctgagtcgacatggtttatacgggaaggccagtaacgtgattgatcgttggaaagcgtttctgcacctgcaccttaccacccttcccgaagttacggacgataaccatcctcgctcggactgccatgcgtggagcgccctgccgctgtcagaatttacgggggaaattctgggtgtgcgtccgggggcaccaggctacagtgaaattatcgtatctccgcagccgttacagctgagttgggccaaaggctcggcagcgacccgacatgggtctgtggaagtggaatggacactggacgaggaagccgtttttcgcatgtcaggcaatggtccggtgggtattcctctgctggtggtattgcctaacggtaaacaggtagaattccgtcatgggggtaaattcgaagcgagcgcaaagcttcgcgccgaaaatctgtactttcaaggctcacaccaccaccatcaccactga

SEQ ID NO: 1105 - DNA, 2577 bp, Artificial Sequence
  6xHis UPI0003E2544D
atgcagtcaaataccgcggtcttactgaaagggggcgatgcggtttatatgaaagtgaaaggtgataccgacaacatggcggcgaaagactggggagattggagtgcccgttggatttggctccaggaagaacaagggaatgcagataaagatgcgcgccatgaacgcgtatattttcgtcgagtgttcgaattgccggctggtacgggtaaagcctactcactgaacatggccattacgggtgatagccggtatcgtctgttcgtgaatgggcagcggcaatgggcgggaccgtgtaaaggacacgagcacgtgcagtattacgaggagtttaatttggaaggcatcctgcaaccgggcattaatgtaattgcggtgaccgtggtacactatgcgggcaccgcgccttttgaaatgggcgaggatggaccgctgtcggtttggcgctcagaacagggcgggcttctggttgaagcagaaattactgcggatggtcaattagtgcaggaattacctacggatacaagctggaaagcgattcgtgatttgagttatcgtttacgtccgtttccaatgatgcgttggatgggtggattggaagaagcggccggggataccgcattacgcgattggacgctacccgaatacgatgacagcgcctggtccgcggcacgcatcgttcagccagttcgtgacgattatggccagctgactccttggcaactggaacgccgccccgttccgttactgtacgagcaagaacagtgcttttggaaactcatgcgtagctcctgcggggaaggtaaagcgctgtttaccgccggccaccgattggagctgcgtgatggagcgtcatctacggttccgtcgattgcggggccagccgcggaaggcgttcttgtgcaggccggacagcagctgtggctggaattagatgcgggtgaacttaccaccgggtacttacagcttaaactgcagggaggcggcgggagcctcatcactttgcagtatgccgaatgctatgaggaagaaactggcgacgaagaagtacgccgtaaagccgtacgtgacgaaatgcgcgagcaggttctgcgtggagggtacgattcataccgcccagcagggtatggcacagaagatcagccggaagtgtatgaaccgttttggttccggacatttcgctatgtgcgtctcgaagttcatgcgggacacgaaccgttgcgcataacgggtattaattatcgtgagaccggctacccgttacagctgcagggctctttccattgctccgatgaacgctataaccgcctctgggaactttccgtgcgtacactctctcgctgtatgcatgaaacctatgaagacaccccgtactatgaacagctccagtatactatggacacccgtttaatgatggaatttacatatttattgtcgggcgatgaccgcctcgcgcgtcgtgcaatggaggattaccgtgccagccaactccctaatggcatgcttcaaagccgttatccgagcgtgttgccgcaagtcattccgtcttttagtttgtactggattggcatgattcacgatcactatcgtgtgttccgcgatcttaccctcgtaaaacactatcgcacggctatgctgagcgttctagattggtttgaccagcgtctaacaccggaaggcttggtggaccggaccccgcgtcagtactggaactattatgattgggtggaggagtggccgctcggtgcgcccgattgtaccaacgaagcccctgccacgctgatgagcctgatgtatgcctttgcccttggccaggcggccgagctgcttgaggcgagcggttggacccagattgcagccgagttacgtcaacgcaaggccgcggtaaatgccgcggttctggataattgtcgtcaggcagatgggcctctttttcgtgactcaccagaagcaggacccgaagttcagctgtcgcagcacactcaagtatgggcagttttagcgggaacggtctccgcggcggagggtgaagccctgctgcagaccgtcctgaccgacacctcaatggctaaactgagcttaccgatgtcatattacctctttcgtgcacttgaattaagtggcatgtacgacaggagctatggtctttggacccgctggatgaaacagttagaactcggcctaaccacgcttccagaaattgactcagcggatacccgcagcgattgtcacgcatggagtgctcttccgatcaccgaattcactcgcggcatcttgggtgtacgccaggatattgacggtatcatcttgcagcctcattgtggtgatctgcagtacgcctcaggcgccgttagcaccgaacaaggcttaattaccgttagttgggaaatcacaacggaagaaggtgtcgaagtgttccgtttggaagcggtgtggactccggggagcgctatcacagtaatcttgccgaacggcgaggtccagaagtcagacaccggacgcatcgagattgatattcgcggcttcaattgtgaaaatctttactttcaaggcagccaccatcaccatcatcattga

SEQ ID NO: 1106 - DNA, 3360 bp, Artificial Sequence
  6xHis UPI000005ADD2
atgaaatcgcgtctgaagcagcagatttttgcgatttctctgctggcgtgcaccgccatatcaccggccaatgccctgcagacccacctcttacgtgagcagtttcagaatcctagtgatgaggcgaaaccatggaccttttggtactggatgttcggcgctgtttcaaaggaaggcatcaccgctgacctggaggccatgaaacgcgccggtctcggaggcacgtatttaatgccgatcaaaggtatcaaagaagggccccagtacaacggcaaggcgcaacagcttacgccggaatggtgggagatggttcgtttcagcatggaggaagccgatcgcctggggttaaaactgggtatgcacatttgtgacggtttcgctctggcgggcggcccctggatgaccccgaaagaatctatgcagaaaatcgtgtggtcagacaccatcgtcgatggtggtaaaattaagggcttgcacttacctcaaccggaagcatacgaaggtttttatgaggatatttcgctgttcgccctgcctgttaaagaggaggccgcggatgtaatgccggcgcaaattacctgtgcgaacatcgcgactggtaatcatattgacatcaaaaaaaccgtgaacatggatgacgcgggcgtgatccgtagttcgtatccgtgctatattcagtatgaatacgaacagccttttacctgtcgcaacattgaaatcattctctccggcaacaactatcaagctcaccgccttaaggtgatggcgtcggatgacggtgtgaactaccggttagttaagcaattagtgccagcgcgtcagggctggcagaacaccgatgagaactcaactcacgcgattcctgccacgaccgcgcgctatttccgtttttattggaccccggagggcagtgagcctggcagcgaagatatggatgcggcgaaatggaaaccgaacctaaagattaaagaactgcgcttacaccgcgaagcacggcttgaccaatgggaaggcaaagcgggtctggtttggcgtgtcgcgtccagcaccaagaaggaagagatcggggaacaggactgttatgcactgagccaaattatcaacctaactgaccctttcaaaaacagcccttccgataatttcaaggaacgtacgctgacggccaccctgccgaaaggcaagtggaagctcttacgcatggggcatacagcgaccggtcatactaacgctaccgcaggcggtggcaaaggactcgaatgcgataaattcaacccgaaggccgtgcgtaaacaattcgacaactggttcgcgcaagcctttgtcaaaactaatccggacgtggcccgccgtgtactgaaatatatgcacgtggacagttgggaatgtggctcgcagaattggtctgacacctttgcggccgaatttcgtaaacgccgtggctacgaccttatgccgtatctgcctcttcttgcgggtatcccgatggaaagcgccgaacggagcgaaaaaatcctgagagatgtacgcaccacgatcggggagttagtagtggatgtgttttaccaggtcctggccgattgcgcaaaagagtacgattgtcagttttccgcagaatgtgttgccccgacaatggttagcgacggactgctccactaccagaaagtggatctgcctatgggtgaattctggctgaatagtccgactcatgacaagccaaacgacatgctcgatgccatttctggggcacatatctatggcaaaaacatcatccaggcggaaggtttcactgaagtgcgtggtacctggaacgaacatcctggtatcttgaaagccttactggatcgcaactacgcccttgggattaaccgcctgttctttcatgtgtacgttcataacccgtggcttgaccgcaagccaggcatgaccctggacgggatcgggcttttttttcagcgcgatcagacctggtggaacaagggcgcgaaggcgttctgcgaatatattacccggtgccagagcctgttgcagtatggtcaccctgtggccgacattgccgttttcactggagaagagatgcctcgccgttcgattttaccggaacgcttagtgccgagtttgcccggcatttttggcgcagagcgcgtggagtccgaaaggattcgcctggcaaatgagggccagccgttgcgtgttcggccggtaggggtcacccacagcgcgaatatgtcggatcccgaaaaatgggtcaatccgttacgcggttatgcttacgattcgtttaataaggatgcacttctgcgtttagcgaaggcagaaaatggtcgcatgacgttgcccggcggcgcgagctataaggttttagtattacctctgccgcgcccgatgaacccagatcctgccgcgctgtcgccggaagtcaaacagaagattaatgaactgaaagaagctggtatcctcatcccctctctgccgtacaaagaggacgacttctctagttatggactggaacgcgatcttattgtgccggaaaacattgcgtggactcaccgacagggcgagcaaggcgatatctactttattgcaaatcagttggaagaaacccgaacgtttactgccagcatgcgcattgacggtcgtaaacctgaatgttggaaccctgtcaccggcgaaattaatgcggacattccgtatgaacagaaatctcaccgtaccgagatcactctcaccctggcccccaatgaaagcgtatttatcgtgtacccggctgaggaagacgacaaggagaccagcgagaaagaacggaaagagaaaaaagactctgttaaggaggctagtgagacgggcttagaagcgaccgaatatactgtgacatttaccgctaacggcaaaaccattcagcgacaggagctgtttgattggagcaaggaagaagatgaacagattcgctattatagcggcactgccgtgtataaaacgacttttcgttggaagtcgaaagtgaaagaggatcagcaagtgtacctgaacttgggtaaggtgtgcgatctggctacggtccgagtaaacggtattgattgcggtacgatatggaccgcgccgtatcgtgccgatattactgctgcgctgaagaaaggagtgaacgagctggagattgaagttaccaacacctgggccaacgccttaaaaggtgcagatgaaggaaaggcgcccttcgatggcatttggaccaacgcaaaatatcgtcgcgcggagaacacactgctgccggcgggcttattaggtccgctgaatttcgatgtcgcaaacaaaaataaggaaaatctctacttccaggggagtcaccatcatcaccaccattga

SEQ ID NO: 1107 - DNA, 2901 bp, Artificial Sequence
  6xHis UPI00005BA60B
atgagctatgaacaactgtctacttcacaatcacaagtttcacgcttaattgtgcgcgttgagcactatcagtctactttaggcattggcaacccctgtcctcgcctgtcgtggattattgaaacaaatgcgaccaactggttacaaaccgcctatgaaatcgagtgttacacaaaagacggtcgcgtgcgaggccgcaccggttggatccattctccagaaagcgttctggtgccgtggccctttgagccgctgacgagccgcgaacaagttttagtacgggtgcgcgtgcgtgacaacaagggtgatatcagcccttggtcagaaatgctgccgatcgaagcgggactgttaaaggtgggcgactggtcagctcgttttattacccccgattgggatgatgatattctgaaaccccagccgtgtcctatgttgcgccatgaattccgtgtggataacgatgtaatacaagcccgtctgtatatcacctctttgggcgtatacgaagcccaaattaacggtgtggtcgttggggatcaggttctagccccgggctggactgtgtatgatcgtcgtttacgttaccaaacctttgatgtgacgatgcatttgcgcgagggcatcaatgcgattggggtgattctgggggatggctggtttcgtggaaggctgggttttggtggtggccgtcgtaacatttacggcaatcgtctggcagtcctggctcaattagaaattacctatcgagatggtagcactcagcaggtgtgcacagatcaaacctggcgttccactacaggcccgatcttagcgtccgatatttatgatggcgaaatttacgacgcccgcctggaactccctaattggagtaaaccgggttttgccgaccatcagtggagtggagtacgcctactagaatgggattttagcaccctggtagcgccgattagcccgcccattcgtcgtatcgaaatggtgttaccagtggcaatttttagtagcccaagcggacgtacgattgtagattttggccagaatttagttggccgtgtgcgcttgaccgtgagcggcccgccaggacagatgatcactgttcgccatgccgaagtgctcgaaggtggggaactgagcacccgcccgttacgattcgccgcggccactgatcgctacatcctgcgtggcgatggaacagaagtttgggaacctcgtttcacctttcatggtttccgctatgccgaaattgatggatggccaggcgaacttcgaaccacggatattgtagcggtggtgatccatagcgacatggaacgtattggttggtttacgtgctccgatcaactgctgaaccgttttcacgaaaacgtagtatggagcatgcggggcaatttccttgacgttcccacggactgccctcagcgcgatgagcgtttaggatggaccggcgatatccaggtattcgccccgacagcagtgttcctgtatgacgtcgcgggtctgttacagtcgtggctgattgatctggctattgaacaggaaaaactggggggcgcagtgccccatgtggtgccaaacgttctgggtcctagtgcggcaggtgcggctgcgtggggcgacgccgccaccgttgtcccttgggtgctctttcagcgttatggggacaaacgtgtactggaaactcagtacaaatctatgcgttcatgggtagattacattgccaccaaagccggacacacctatctttgggatcgcggcttccagtttggcgattggttagatccgacggcaccgcctgataaacctggtcaggcgcgcaccgataaagcgattgtggccagtgcgtattttattttttctgcgacgctagtcgcgaaagcggcgcatgtgctgggttatgatgccgatgcagacttctatgccgatctcgcccacaaagcgcgtttcgcgttcgctaaggaatacattacaccggcgggtcgtttgatgtgcgacaccgagacagcttacgccttagcactggtgtttgacttgttcccaaccgatacccagcgtcgctacgccggagaacgtctggccgcgctggtacgggacagcggttatcacattcgcaccggatttgtgggtacgccgctgatctgcgatgcgttatgctccgtgggccattgtcgcgtggcgtatcggttactgatgcagcgtgaatgtccctcttggctgtatccggtgaccatgggcgcgacgacaatctgggaacgttgggatagcatgctgcccgatggttccattaacccgggcgaaatgaccagttttaatcattacgcgttaggggctgtcgccgactggatgcatcgcactatcgggggccttataccggtggaaccgggataccgacgaattgagtttcgtccgcagccgggcggcgagattgtttatgcacgagtgtcacaccgcacgccatacggtctagccgagtgtttctggcgcattgaagaaggagttttttacttacgcgtggttgttccgccgaacaccactgcacaggtattcctgccgggccgtgatgatcagcctctggatgtggggtccggcatttggcaatggtcaatcccgtgccaggatactgcgactcgtggtagttatacagtagacgatctcgtagacgaaataatcgacgacgaggtcgcgcgtgaagccgtaaatcaagtcctcagtcaagtcgacgcttggcgcttattcggaaatctcctgctgaatgaacgatccgcgagtttacgcgaagcgatccaggccctccctaatagcgaaatcgtgattgaacgcctgaacgccctccttacccgtattcctaaaaaagacggcattgaaaacctatactttcagggcagccaccatcaccatcaccactga

SEQ ID NO: 1108 - DNA, 2667 bp, Artificial Sequence
  6xHis UPI00000B098C
atgatgcgtgtttacaacctgaaaaccaatcgaattaagaacccgatgggctttgtcattaacaaaccgaagctaagctggttagttgaaagcgatacagcaaagcatcaagtcgcggcccaagtggaaatcagtgcggatatcaattttgaaaacattatcttcgattcaggcaaacgcaccgatattgatagcatcagctattctccgcaggtagaactgaagccgcgcacccgttactattggcgtgtacgcgtatggggcgacgatggttctgaagctgtgagcgaagcggcgtggttcgagaccagcaaaatggatgaaccgtggaaagctaaatggatcacccctgacttcgacccgagcgttcacccggtggtctttaccgatttttcaattgagcgtgacgtggcagatgcccgcgcgtatgtttgcggcctgggcctgtatgaaatgtccgttaatggcgaaaaaaccggcgacgagtatctggcacccggcttagtagcatacgataaatggattccatatcaaacgtatgacataaccagccagctgaaaaaggggatcaacaccgcagagttcctgctgggcaatggctggtataaaggtcgctatggactgaaccgcaaacagccgttccgttacggcaatgaattcgccctaatctgtgagattcatattacgtaccaggacggcactgccgatgtgatttacacggacacctcatggaaggctcgtaagagcaaagttatagattctggtatttatgatggagagatctacgacgacacattttgtgatgatgcagtttatcctgtgcgaattgcagacctggacgtgaacaaattggaaccgcgtcgctcacctggcattaaaattaaagaacgcatcaaacccgctgagattatacgcacgccggaaggagaaaccgtgatagacatggggcagaatatggtggggtggcttgaatttacaaatcgcgccccaaaaggcgcagaaattatgctgcagtttggcgaagtgttacaagacgggaacttttatcgtgataatcttcgtaccgccaaatgtgaatttcattatatcagcgatgggaaagttaaaaaagtccgtccgcatttcaccttttatggctttcggtacgtcaaattgaccaaatgggagggtgaagtgaacccggaagacttcacaggcctggtactgtattccgatttggaacgtacgggtaacattaccaccgataactctctggtaaatcgtttattcctgaatgcactgtggagccaaaaaggcaacttccttgatgtgccgactgactgtccgcaacgagacgagcgcatgggttggacgggagatgcgcaagttttcagcggggctgccgccttcaatatggatgtgttcgcattttttggtaagtatctgtatgacctgaagcaagaacagaaagcgcgtgggggtaacgtgccggtggttgtgccagctcacgatgtaaaacagaatggggcgtgtggatggggggatgcggcagttattatcccgtggaatatgtatctgcactatggcgatgtctcaattctggaacagcagtataagagcatgaagggatgggtggattacattaaatctaaggatgacgcagcaggtggccgccgcctgtggcttaacgactttcattacggtgactgtgttagcttggacgttgaagatccgtttaatcgctttggtggtaccgagcacgcgtatctcgcaagtgccttctattcatatagcgcgggaattgtgtccaaagcagcgaagatcttaaacaaaaaagaagatgcggaatactatcgcaaactgagtgaggaagtgaagaacgcgattcgtaaagaatatttcacacccactggtcgtctggcggttaacacacagacagcatacgttattgccctgtacatggacctcgttcctgatgaatggaaagagcgcgtagcgttcgaactgcgtaaaaaactgaaagagaccaaatatcatctccgcacgggtttcctgggcacaccttatctgtgccgcgttctgagcgagtatgggtctaatgacatcgcgtaccgactcctgaccaacaccgattatcccggttggctgtacccagttacaatgggcgcaaccacaatctgggaacgctggaattctatgttgcccgatggtaaagtaagcgacaccggcatgaactcttttaatcactattcgtatggctcgattgtggaatggatttaccgtaacgcagccggaatccagccggtggaggatgcaccagggtttcgccgctttcgtcttaaaccgcagccccattacttgctgaaatcactggatgccgaatttctgtcgcctgcagaaaaaattattagccgctggaacatcaacgaaaacggctcagtatccttctactttcgtattccctttaatactaccgcggaactggtcctgccggatacggaagtgcaagattggaaagaattcatgagcctgaatgtggtgaacatcctgatccttacctgtttaaaagatctgacccgcaaatgtactgagcaaatcctgcagtgtggtaaatttatgaagatgcgtggccaaaaaaaattggagaacctgtactttcagggcagccaccatcatcaccaccactga

SEQ ID NO: 1109 - DNA, 2646 bp, Artificial Sequence
  6xHis UPI0003E5C314
atgattactatcattggactgggcgttgaacattcggagaggggctgcgtgaccgacaaccctcacccgcgtttttcatacgcagtgcgttctgaccgctctgatgtggtagttgatggcgcccgtcttgccgtgggagattggacctgtgaggcgggcgatcaaacggcagtggcctacgatggaaaacccctggaaccgttcactgagtatcacgttactcttgatgtctctacggccgatggtgaacatgcccatgctgagacgaccttcgaaacgggtcgtctgggacagggttggcagggtcgctggattagcgatgctggttacgactttgtggagaaaaaagtgagcccggttcccatgatgttccgtaaaccgtttacctgcgatccgaccaaaagtgtgcgtaaggcacgcctatatgccacggcgatgggtgtttatgactttgcgtgcgacggcaaacgcattggcgaccgctactttgccccgggattcacctcctacaaaactaatctgcagtatcagacttacgatgtgactgacatggtgggagccggagcagtccacaccttgctggcgacggttgcgggtggatgggcagtgggtagtttcgtgtttacgcgcaagaatcgcgtttcagccgaccgccaggcgctgctggccgagctgcgaattgaatatacagatggtagtgtggaagtgattggaaccgatgccagctgggaagtttcggaatcgggtcctgttcgtatggctgatttatatgacggcgagacctatgacgcaatgatggatcctggggcagatggttctcgctgcaaagactggcgtcatgcatctttagaaaacccgcgatctcgaccgcgtcacattgaagctgattatggtgctggcgtggtggcgcacgagacattatctcctgttagcgtagcacgcagggcgggcggtgaactggtttacgattttggtcaaaacttagccggtgtggttcgtatgcgcattgcgaacggccgagcggggcagacggtggttgtgcgccatgccgaaatattaaaccctgatggtagtctgaatactgcctttctgcgcacagccaaagcaaccgcgacttatcgctgtgcggacgctgatggttttcccgaaggagtgcaggaatatggcccacgttttacctatatgggttttcgctatgtcagcgtacgaggggtggcggaagatgatttacgcatcgaagcagtagtgcttcatagcgacctcagaccgattggtgatttcgcatgcagcgatgaacgtttgaatcagttgcagcataatattgtttggggcgccaaatccaatttaatggacattcccactgactgcccgcagcgggatgagcgtatgggttggaccggggatattgcagtgtttgcaccgactgcctgcttaaactttgatatgagccgcttcctggaaaagtggttacgcgatgtcaaagcggaacagctgaagaccggtggtattcctaataccgtgccggtgcagggttatggcttccccgcgactatgccggagatggccattgactggtggggagatgcttgcgtgttggtgccgtgggcggtgtaccgtagttcaggcgatgccactgtgttgcatgacatgtatgatactatgaaacgttatgtgaaagcgtgccgtttctgggcgggcttaatcggttttggtaagtcacgctatatctggaacaccccaagtatgcttcatttcggcgattgggttgccccggatgtgcctaaaatgagccaatggcaaaaacgagcgaagtggacggcaacggcgtcactgaacaataccagccgtactttagctcgtgtagcggaagttctgggatacgacgaagatgcccgtgcttatgatgaacttgctgataaagttgcggatgcatactgctcggtcctcaccgatgggaacggtcgtctcgataatgagttccaaaccgggtatgttctgcctctatacctaaatatgttcccggaaaccgtgcgcgggaacgcggtggatcacttagttaagttgattgaagataacgattattgcattgggacgggtttccccggtaccccttatattctttttgcactggcggataacggccgcgaagatgtagcttatcggatgctgttaaacaccgcgtgcccgtcatggctgtatgaagtgggtatgggtgccacgacgatttgggaacgctgggacggtctggatgagaatggcgaatgtccgattggagacgatgggacggatctgatgatttcttataatcattatgcgtcaggggccgtcggcgcattcctgtaccaacgcgtggccggcattgaggctattggcgcggcttaccgcagcttccgtgtgcgtcctgtgctgggcggaggcttaacctgggctaaagctcatgtggatactccgtatggtcgcgtggggagcgcctggagtttagatggcggccgcttttctatcaccgttgaagtgccggttggtacaacgtgcgaactcgcccttccggatggcacgacaatgcaattgtccaatggcgtccacactgctacttgcgaaatggagaacttatattttcagggttcgcatcatcatcaccaccactga

SEQ ID NO: 1110 - DNA, 2715 bp, Artificial Sequence
  6xHis UPI0003AE032C
atgcgtgccacaaatttgaccgttgcatgcctgaccaatccgctgggtattgatgtacgttgccctgagttagcgtggatcgatgaagacggtctttcacaatcggcctatcaagtggagtgtaaagacggtgcgggcgccaccttatgggatacaggtaaggtcgcgtcggctagcatgcgtattgcgtggccgggcgctgcgttggcgtctcgcgaacgcgttacctggcgcgtgcgtctatgggacgatggggatgcctgcggtccctggtctgaatttgcctctatcgaagaaggcctgctgagtgcagatgactggtgtgcacgatggatcagcggaaattatgatgtgccgactccgcgtgcaggtgcgcttggcaattttcgacagatggttgccgcaatgcgcccagcgagcccggaccaggtggttaccgagccgatcctggaaggccgctacccggtggattgcttctgccgcgccttcgtagtgggcaaggcaccggttcgggcacgtttatatatcaccgcctgtggcctgtatgaggcacgtatcgatggtgagaaggttggcgatctgtgcatggcaccggggcatactgattatcgtaaacgagtacagtaccagacttacgacgtgacggctgccctagcgacgggagctcatgaactgaccgtacagttggccgatggctggtaccgagggagctgcggtgcgtggggattactgaaccagtacggtacccaaacgaaactgctggctcaacttgaagtgacgtatgccgacggacacgtggattgcgttgcaacggatacagactggcagtggtcgggggatggcccgattcttttcgcagacaataaggacggagaaatggtagatgcgactcgcgccccgagctatgcaggccacgcccgtgatgcacgccatgatgtagctccgacggcctctaataatgttccgattacgatgcatgagcgtttctctcctgcaccagcgctggcgcctaacggtcgcctcctgtttgatctgggtcaaaacattgcgggttgggttgaactggatttcgacgcgcacgagagtcaacatgtattactgcgatgcggtgagatgctggatgcagacggcaacctcacgctgaaaaatattcagtgctcacgcgagggcttcgcaactccgctccagcaggttgaatatgtatgccgcgaagggcataaccattaccgtacgacgttctgcgtgttcggctttcgctacgttgaggtggagacgaatgtgcaactcggagagggaagccttaccgccatcgccttatatagcgatatgcgtcaaaccggcagcttcgaatgctccaatgaactgctgaatcgctttttcgaatcgactgtgtggtcaacaaaaggcaattcgctggacgtacctacggactgcccgacaagagaacgccacggttggagtggtgatgcgcaaatattctttgaaactttgtcgtatctgttcgattgtcgctcgttcgaacgtaagtggctgcatgatcttttcgattggcagaaacgtgatggcagactgcctcaggtggccccagccggtggtgtggattcgtatatgcgcttcctggacggttcagtcggatgggccgatgcagggatcctgatcccctatcgctattggcgtcactacggcgatgcgtcggttctcgcagaactttatgatggcatgcgccgctacgccgaattcatgatccgtcgttgtgggcgacgtggcccgttctcgaaacgcgttggtattcatggtgaagcgaaaaaatatctggttaatatgggccagtgctacggtgaatgggcagagccggcggacgtgcacaaaatggattggaaagatacggttgccccccatcccgaagtcgccactgcctacaccgactacgtactgggttgtatggcccaaatcgcccgagaacttggccatgaagaggatgaagcccgctaccgtcaatattccgaaggctgccgtttagcttaccaagagctctcacgcctgcccgaattttctttagatactgatcgccaggcccgcttagtgcgtccgctggcgtttggactgctcgacccccaacagaccgcgtacgcccgtaagcgtctggtgaaagcgtgtgaaagctatgggtggcgcctcggaactggtttcctgtctacccctttaattctggacgttctggccaaatacgatctggatgctgcataccgtctcttggaaaatgaagagatgccagggtggttgtttatgccgaaaatgggtgcgaccaccgtttgggaatcctgggaaggtacccaggcccagggaggtatagcgtcattaaaccactattcgaagggcgcggtgtgcgcctggctgttccgtgttatgtgcgggattgcaccggacggcgaacgtcatgtaactgtcgcgccgcgtcccggcggtcgttttgcttatgcgaaggcaggctatgaaagtccgtgcggcttcgtaggctgtggttggcagcgcgtggaggatggatggcgctttgcggtggaggtccctgcgaactgtgcagcaacagttgtgctgccggatggtagtacacgtgaagtgggagcgggagtgcatgaatttgaatgcgtcgcgcgtgcggcacgcgaaggtgaaaacctatatttccagggctcccatcaccatcatcaccactga

SEQ ID NO: 1111 - DNA, 2835 bp, Artificial Sequence
  6xHis UPI00019BDB13
atgagttttccggcagctccggcacgactccgatttgaacatcgaacggacccaggcccggtgttaggtatcggtaccgcgaccccaagattaagctggcaggtccctacagcccctgacgattatcgccaggctggttacgaagttgaaattgcacgtggcgatgccgcgcccgaacagtacacggtcgatagcgccgatcaggtacttgtaccttggccgggcactcctctggcagctcgtgagtcggctacggtccgagtccgtgtgcgaggcgacggggattggtctcagtggtctgaccccgcgacagtcgaagcaggacttctgagcgcggacgactggaccgcccggttcgtgtccccgcgtgagaatgcgggtcacgaagcaccggcgcctctgattggcggagtaattgatctgccggctgatattgcccaggcgcgcttatatgcgactgctcatggcatttatgagcctacgcttaatgggacgcgtgtaggtgatgaacaactggccccgggctggacagcatacgagcagcgcctgcgttatcaaacctatgatgtgaccgacctggtggcacccggcgaaaaccgtttagaactgttggtcggaaacggctggtatcggggtcgcctgggatttcatggtaaacacagtctatatggagatcgtttagcggttttggcacagctcgaagttaccaccgccaccggtgaagttaaagtgctcgcatctgacggtacctggacgacacgtgaaacgaacgtacttgccgacgatctatacgatggccagcacgtggatttgcgtcgtacattaggcgagccgggccctgtagatgtgctagatgccgacttgagtttactggtcgcgcctgatggtccaccagtgcgtgtcaccgacgtgttaccagcgaaggctgttactaccagcccagcaggtaaaaccctagtggattttggtcaaaatgtcgtgggccgcttacgcttacgtgttcgtggaggtgcggcaggggatgagattgttctgcgacacgccgaagtcttggaagacggcgagctcggcgtgcgcccgttgcgtacggccaaagcaactgacagctttgtgcttgcgggcccggatgaggttacactggaaccgacattgactttccatgggttccgctatgcagagattaccggtgtgccggacctgcgcgcggaggacgttgaagccgtggtagttggcagcgatctgcgtcgtaccggatggtttgaatcgtcgcaccccctattagaccgctttcacgaaaacgtagtttggggcatgcgtggcaactttttggatgtcccaaccgattgcccacaacgtgatgagcggttaggttggaccggcgacatacaggtgtttagtccgaccgcgtctttcttattcgatacggcaggctttctgaccaactggcttgcggatctcattgcggaacagcataaagatggtagcgtaccctttgttgtgcctgatgtactgaggcagcctggtcctgcgaccgcggcgtggggtgacgccgcgacaatagtgccgtgggtactgtacgagcgcacaggtgatgccggcctgttagcacgtcaattaccgagcatgcgcgcgtgggttgatcgtatggccggcctggcgggcgatgacctgctgtgggtcggaggtttccaattcggagactggttagatccgacagctcccccggacgatccctttcgagcaaaagccgatccagatgtgctggcaactgcgcacttagctcgttcagccgaagtagtagcgttagcggcagaagtggtgggagcaggcgagttggcgcgtgaatatgcggaacttgcggcgcgtgtccggcaagcatttgcagcagaatatacaaccggctctggtcgggtgttatcagatgctgcaaccaactatgcattagccctgcagtgggcgttgctgccgacggaagctcaacgcaaacgcgccggtgagaggttggctgatctggttcgcacggctggcttccggattagtactggtttcgtaggcacgccattgatggcggatgcgctggcggattctggtcatcctgatcttgcgtatcgcttactgctggagacgggctgtccgtcatggttatacgccgtgacgatggatgcaactactgtctgggagcgctgggattcgatgctgccggatggctcaattaatcctggtcagatgacttctttcaatcactatgcgctcggagcggtggccgattggatgcatcgtcgtgtggcgggtttagcgcccggagatcctggttaccgccgtattgtagtcgatccgctgtttaccgcacatttaaccaaagcatcagcacgacatcttactccgtatggggaagcggccgtggcatggtcgcgttcaggcggtcgtgttcgcttagaagttactgtcccagtaggagctcgggcgagggtagccgtacccggtgaaagcgcacctgtagaagtgggtcacggtactcatgaatggacggccgatgacgtatacggagaaaccccgccccttccagccgacgccacgattcgtcagttaatcgaccatgagccgagttggacaaccttagcggcggcggcgacccgtaccggtatcgtagcggatgacgccgagttagcaggccgtttggaacgctatctggatcatccggccaccgaactcgtggatgcggtttccccacgcggctttagcccgagcgcagaagcactccaggccgagctagacagtgttctgggccgtgaaaacttatattttcagggttctcaccaccatcaccaccactga

SEQ ID NO: 1112 - DNA, 3126 bp, Artificial Sequence
  6xHis UPI00000C7226
atgtttgaattggaccgccgtgctctgctgttgggtctgcctgtgactagtggcgcgcttgcggatggggcgagtcaaacgtcaaggtggcgagctgtcggtttgcgtactgctatgcgtcgtcaaccactgggtatcgatgacccacaacctatgctgtcgtggcggttagaaggcccggccggtgcggtccagtcagcgtatcagattatggtggcaagtacggcggaaaaactgcatgctggcgtggcggacctatgggatagcggtcgggtgaagagcagcgaatcggtaggcgtgcggtatggcggtgcgccgttgaaaccgcgacagcgttgtgtgtggcgagtccgtgcttgggacgctgcaggacgtgccagtgattggagccctcccgcgacatgggaaatgggtcttatcgatcagagcgagtggattggtgattggttagctgtggaagccgcggacgaacgcgacgatcgggttgccggagtgcgttgggtcgagacccagactcctaaaccgcatgaaacttgccgctttcgcctgagctttcgttccggcggtggcgagggtcgtttagcaattatggcggagggaaaacttagtaaactggtgctagatggtcgtagcattgaactcccgtggcgagacccaaatggttacggagatccaccagctctgggcttaccactgcagctggaggctggagcccatgaattaattgccgaagttacctctaccggaccgggagaaggtccggggcgtgcagctctaggagcacaagttcgcgtgctggccgccgatggcgcggctcgtcggattgtcgatggttgggaaactgaggctgcaggtgcctggaccccggctgtagtccgaaccgctcaaccacactttccgtggccaccgacccccgctcgtttactgcgtcgtacctttacactgagcaaacctcccacccaagcgcgtttgtatgtgtcagccttaggaggctaccgcatttggctgaatggtcgtcgtgtcggagatgatgaactccagactgagcctgcggcgtatcgtcgccatgtaccttaccgtgcctatgacgtaactgatcttttacgagacggtgaaaacgtcgtgggcttaattgtaggagatggcacctttgccagttaccaggcaccagacggtcgatacgcttatggtccgggacctcgacgtgtgcgtctgttcctggaatctcgtgattcgggtgatcgtgttgagcgcgtagccacggacggcgaatggcgtcatgcactgagccctgtattgatgagtgagatctatgccggggaagatcatgacctgcggctctggccacgtggttgggcggaaccgggctttgatgactctggctggtcacgtgtgtggactgcgccgcccccagaaggtgccccatgtgcgcttttatctgagcctattcgtgaaacccgggtcctgaaagccgcgtcgattagagccgtgggtcccggccgccacattgtagactttggccagaatttcgctggccgcgtacgcttacgcgtgaaaggcgcaaagggtgcaccggtgatagtccgtcatgccgaaatcttagatgggcagggagccctggatcgtcgcaacctgcgtgtcgcacgggcggaagaccgttacatactcaatggggacgatgcaccggaaactcttcaaccgagctttacctatcagggcttccgctatgctgaaattgaaggtgttgccggccttgaccgcgatatgatcgacggcgtggttctgagctcggatcttcctgaaatcggtgtgtttcgtaccgccgaaccgttagtgcagaatctgtggctgaacagcctctggtctcagcgaagcaactttatgggtatcccgacagattgtccgcaaagggatgaacgtttgggctggacgggcgatgcacaggtgttctgggaaacggcagcgtttaacatggacgtaggaggctttacccgtggttttgcccgcactctgcgcgatgatcaggcaccgaatggcgcgtatccgatgtggtcaccgagtcctcgaggccttggctggggtaccaccaccccaaccccgggctgggcggatggtggggtcatgctcccttatgtagcataccttcacagcggcgaccgttcgattgtggacgaaaactggactgcgatgagcgcctatgtgtcgggggtcttagcagagaacccagacggcctgtggaggcgtggccgaggggcggattttggggactggctggcattggacggtaaatggccgggggatgaaaccactccgaaagatctgatcgcgaccgcgatgctggctcgctctgtggaccagttggcgcagatggccgcgtggacaggccgtagtgccgaagcgaagacctggcgtggtcaggccgatcgcattaaggcagcatttgcgagcgcctttgttcgcgccgatggtacagttggtaacggatcgcacaccggctacattttggccttacgtctcggtctggcacctcagccgttacgaaaggccgcgggcgaacatttagctgcggatatacgtcgccgaggcacgctgctgtctaccggttttctgggcacccctcttgccttagatgcgttagcggatcacggccatgcgggtctggcattcgatttgctgcttcgcacggaatacccgtcctggggttatatggtgcgccgcggtgccaccaccacttgggaacgctggaacggcgataccggagacgttagcatgaactcgtttaatcattacgccttgggcgcgatttgcggtttcctgtaccgtcgcgtcgcgggcgtagaaccgatcactcctggtttcggggccttccgcgttgcaccgctgatcgacccgcgtctgcgttcagcaggtgccacagttgattctgtgcgcggtcgtatcgaaaccgattggcgagtaaccggggataaagctgtacttaaggtacgtgtgccggccaactctcgcgcagaagtggtcttgccaaccctgacacgatcgctcggtgccggcgatcataccttatctgtgcccctggctaaagaaaatttatattttcaaggctctcaccatcatcaccaccattga

SEQ ID NO: 1113 - DNA, 2772 bp, Artificial Sequence
  6xHis UPI000005BA09
atgaataaaaaacagctcattctcctgtgcatgttagcggcggggggcagcattcaagctcaacagtggcctgatgctccggctgaagcacgacccggaacgcgttggtggtggttaggtagcgccgtggatgaaaaaaacttaacttataatctggaagaatatgcacgtgcgggcatgggagccgtggaaatcacaccgatttatggggtgcagggtaacgacgccaatgacattcagtttctgagtccgcgctggatggaagtactcaagcatacccaggccgaagggaagcgcaccggtattgagattgatatgaacaccggcacgggctggccgttcggcggacctgaggtgagtattgaagatgcagcgagcaaagctatttttcagacgtacgatattgaaggcggtcaggagattgtgcaagatattaacgtgacagataagaagcaacaagtgctgtcacgggtgatggcgtacgacgaaaacggtcgatgcattaatctgacctcacatgtgcgcaaagacaaattagtgtggaaagcccctgcgggcaaatggaaagtcattgccttatacaatagtaaaacgcgccagaaggtcaagcgcgcagcacctggcggcgaaggttatgtaatgaatcacctgtcaaaaaccgcggtgaaaaactacttatcacgttttaatcgcgcgttcaaaagtagcaaaacgagctacccgcacacctttttcaacgactcctacgaagtttaccaggctgattggaccgaagactttttggatcaattcgcccgtcggcgcgggtacaagttggaggagcattttccggaatttttagatgagaaccgtccggagatcagccgccgtattgtgagcgattatcgcgagactatcagcgacctgttactggagaatcagtggaccgactgggcacacaagaacggctctattacccgcaatcaagcccacggcagccctgcgaatcttatcgatgtgtacgccgcggtggatattccagagtgcgaaggcttcggactgagccagtttcacatcaaaggacttcgccaggacagcctcaccaaaaagaacgattccgacttgtctatgttgaaatatgcgagttctgccgcacacatcgctggtaagccctacacaagcactgaaaccttcacctggttaaccgaacattttcgcacgagcctgagccaatgcaaaccggatatggatctcatgttcgtatcaggcattaaccatatgttctttcacgggaccccgtacagcccgaaggaagcagaatggcccgggtggctcttttacgcgagcatcaatatgaaccctacaaatagcatctggcatgatgcccctagcttctttacccgatgccagagttttctgcagatgggtaaaccagataacgatttcctcatttatctcccggtgtatgatatgtgggatgaacagccgggccgtctgctcctgtttagtatccaccacatggcaaaactggccccgaaatttatcgacgccattcatcgtataaacaatagcggttacgatggcgactacattagtgataactttattcgctcaactcgctttaaggatggccagctgatcacctcgggcggcacaggttacaaagcattagtggtgccggcggcccatctgatgccgaacgatgtgctggcgcacctgctgaaactcgcccagcagggcgccaccatcgtttttctggagaactatccaaccgacgtcccaggttatggccaactcgaacagaaacgcaaaacctaccagcagacccttcaaaaattgccatcggtgagctttagtgtcacacctgttgggaagggcaaaattattaccggtaccgactatgcgcgtacactggcgagctgtaacatccctcaagaggaaatgaaaactaaatttggcctacaggcgatccgccgtgttaacgattctggtcaccactatttcattagcagtttgcaggataaaggggtcaatgattgggtaacgctggggacgaaggcgaaagcagccgccctttttaatccgatgacgggagaatgtggcgaagccaaggtgaggcaagccggtgaacagacccaggtttatctgcagctgaaaagcggcgagtcagtcatcctccagacctatcaacaaccgcttcaggcagcacgaccgtggaaatatatacaagaacaaccgttcagcctgtcactggatcacggctggaagctgcacttcgcggaatctgaaccgaaaatcaagggcacgtttgatatctgctcgtggactggtattgatcatccggccgctaaaataaatatggggagcggcgtgtatagcctggacattgaactgccggcgctgcaggcagatgactgggtcttggacctgggagatgttcgcgagagcgcgcgtgtacgtattaacggacaggaggcggggtgtgcctgggcagtgccataccagctgcgcgtcggccacttgctgaaatccggcaaaaatcacatcgaaattgaagtaacgaatctgccggccaatcgcatttcagagctggatcgccagggtgtccagtggcgtaaattcaaagaaattaacatcgtcgatctgaactaccgtccagccaattacgggcattgggcgccgatgcctagtggtttgaactccgaagtacgcctgattcccgtggattacctgtcatttaagacccatgaaaatctttatttccagggttcccaccatcaccatcaccactga

SEQ ID NO: 1114 - DNA, 2454 bp, Artificial Sequence
  6xHis UPI0003745394
atgaaatcactttcaaaaatcctcacgaccgttacgctactgctggcggtgttcgcgtgcgaaaagaaacctgcagaaattgttttatttagcatgatggatggcgtagaagggttgtccggtaaaaccgagtacttagcaagtccatacgtcactgccggcgatcgcgtgtacatggtgggccatcaggatggaagctttccggacctggggtggcacgttgaaggtgagatgggtggtatctggaaccatcctattaaactcatggacggcttcaccaacgccattgagattgaagggaaccgcttttgtcttgataacgcatcagcctttattaattacccgttcgccaacaaacacgaatttaaaaattcggtgcctgggttagaggtagaacgtttccaatttgttccggacggtaagcagggactggtgatcgaatatctcttcaagaatgtagataagtccaaaaaaagctttgtatttgagtttgatggccacacggatctcatgcctgtttggttaggcgatcgtgctggcatgattgatcacgtcgacaatctcgtattcgacgatcagcgccaggcttggcgtggcaaagacgaaggtaatgaatggtatgtactattcggcgccaaccagaccgctagtcactcgcagggcgactctagtctgtgtaactattttccgcaaggaaaaggtaaatctgcgaaactgagttacgaaatggaattatcggccaatggtgaaggctcattaaagttcttcattgcgggatcgtactctggactcgacgatgtacagaagacattcgatctaatcaaaacccaccccgagacatttctgaaagataaacgtaccaactatgatcgcatcgccagcctgagcaaaattacaattccggataaggaactcgaaaaaacgtttgagtgggtcaagtacaacacagaatggttagttagggatattccagaggttggtagaggcctgggcgcgggcatgccggattatccgtggtggttcggcgtcgataatgaatacactttaaaaggcgcaatcgcgaccggacgcaaggatctcgtgtatgcgacggtagatctcatacacaaactaagtgtgcaggagaatgacaacggcaaaattgtgcacgaagtatcgacgaacggtgtcgtcttcaatcccggcaatatcaatgaaaccccgcaattcgccagccttatttggtatgtttatcagtggacaggagataaagcatttctggagaaatactatccaaccattaaaaagggcctggtgtggctgatggaggaaaacgataaagatgggaacctgtttccagacggctatggtatgatggagattcacggccttgagagcgaaatgatcgacgttgcagtctatacgcagaaggcgtttgcagatgccgcgcagatggcgcttctgatggcagaacctgaagttgcaaggagctatcaacagactgcggatctaatgaaggcgaagatcaacaccgacttttgggtggagtcggctaattcgtacgccgattttattggtacggcagcggagacgtttcctctggttgatgccgcaatcattcgggcggatacgctggggaaaccgtgggctgtcgaggagctcaagcttctgcgcaaaaagctgtctacgtatccccgcaacaaaaagcaaggattcgtcctatttcataattgggtcgttaatacaccgatggaaatggggatagcggatcctgaaaaggctatcaaagcgctcgacaaaggtagcaagtttgtaaatccctttggtgtgtttgtaaccggtattgatcgtgacgaggccagtcagtcggaagacggctcattcactggtagcaaagtgttcagctatacgggcgcagtgatgaccctgccgaccggtgttcaagcgatctcggaaaataactatggccgccccgatcaggccctggcttatttacagatgatggttaaatcgtttggttttgccctgccgggctctatttacgaagtgagcccggactacggaatgatggcacaggcgtggaatctgtatagcttcggagtaccgattgtgacacagttctttggcattcagccagatgcagggaataaagtcatccatatctcaacccaaatgccttcagactgggattcggcaaaaattgaaaaagtcctgattggcgataatgtacttacgctcagcttcctgcgtgtcgagggcgagattcagctgcaaattaaccagacgaaaggcgattggcagatcgattttgtgttcccgacagggaagtataacgtgtggaaggtgggcggcaaagaagtggagaaaacacgagtaggaaatcaggaagtttttcgtacctcaggtacctcgattagcgcatccttcaaagaaaacttatattttcaggggtcacaccatcaccaccaccattga

SEQ ID NO: 1115 - DNA, 2694 bp, Artificial Sequence
  6xHis UPI0004F6D660
atgctccagccgtatgcgcctgcgataaagaactattatagcgcaattggtattgataccccgaaacctatatttgtgtggaagttgtcctctcccctgcgcaatcagaaacaaacacattaccgcattaccgtagccgagaacgcagaatctctggaggaagaaaacaaccttctgtgggattcaggtaaagtggcaagcgatgaacaattgggcgtgatgtacaaagggtcgccgttggaaagcactagccgttattgctggcgtgttgccatctgggactcttcaggtcagagtctttggtcagaagtacagtatttcatcaccggctacttaaatagcgaacactggtctgcaaagtggatcggcgacggatctgacgcgccgttctatgcgcgttacgaatttgacttaaacaaaaaagtgaaacaggcttttgccctcgtttcgggtttaggccagtttaaattctacatgaatggccgccaggtgggtgatcacgaaatggacccaggttggacgaactatcataaatctgttcagtacgtgggatttgatattactgatcacttgcaatcagggaagaatgcggtgggtctacacgtgggtaatggcttttttgcgggagcctcaggcggacgtcacttttacacaatggataagggttacgaaccctatggtgatcaactggtggcgatcggggagtggcatattgaatttgaagacggtagccgcatcatattacgtaccggcgaagaagggtggaaggtacacgaaagtgcgaccaccttagccaatgtgtacggttcagaaaactttgacgcacgtctctacccggacgggtatcacgttccgggctttgatgatagtggctggaaaccggcacaacttctgaaacccccggcgggcaacttagtgcagcaaaaccaaccgccggttaaagtaaaacaggtttacgatactctgtcagttgccgaacccctgccgggcgtgtacgtctttgatctggggcagaacatggctgggatgttcgaaatctatgcgagtggtccggctggctcaaaagtcattattaaaccaggagagctgatgcgcgaagatggcacaattgcgactccgtgggacattgtcacctattcggaatttatactggcaggcacgggcgaagttgaagtctggaagccagatttcagctactacggggcacgttgggtccagattgagggctgtacgcgcgatgaagccgataccgggcgtcctatgatccacgacgtaaagggtcactttattacttcagcctcgcaggataccggcacactgtccaccgacgatgttcggattgataagctggcggatattattacaaaggccatcgaaagcaacctgcagagcgtgcacaccgattgcccaaccattgaaaagttggggtggttagaagcgagcgctctgatgggcccgtctattgtctatgtaaagcaggcagaagagctgtttctaaagatcgtgcgcgatatgatggaggcccagaccgaagagggcctcatcccagacattgcaccggagtacagcttgttccccgacgggtttcgcgactccattgcctggggaatagcactgctgatggtaccagatctgctgctggaacgttataataactttaccgccattgaagttgcgtatccggccatgaaacgctatatggactatctcaaatcaaaagaaattcacgacggtttaatcggtcatgggttaggagactggggcattcagccgcaaaccgggggcgactacatcgaaaacgtagagaccgctttctattacgagggttatcgtctgatggccaaatttgcaggcatcctggggtttacggatgaactcgaagattattcggcagaagcggaacgcatcaaactgaactataacaaacaactgctccatagcctccctgaaaacagcccacgctacgcctactgcaagttaggcggtcaatttgacccggccaatcaggtcgttcaagccatccctctggcctttaatctggtgccggaggagcaactgcacaatgttgaacacgcgctcttacaagcggttgcatcacgtcagttccattcaggtgaaattggcttacggtacctttttctggcgctgtcgcgcctgaatcgcaacgacattgttctagatatgatgatgcagccggaacacccgtcatacatccggtttgtggaacgcggtgagacctctttgccagaattttggactgacgaagcacgtagtcgtaatcatgacatgatgggtcatatcctcgaatggctgtataaagagctgctgggtatcagcagcgcatcgggcgcgtacaaagaaatcttgatcgccccgttccgttctggacgcgttaaacgtgtgaaaggtgtccaccacagtattcgcggcgagattggcgtggagttctcacacagtgccgaagaaatcattctgaacgtacaaatacctgcgaacacgaccgccaccctccagattccacttctgcatggtgagtctcagctgtatgaacgtggcacccgcgtgctctatgaaccgttcaaccagggcgcccagatttacgcccgcctcaagatcggcagcggcagctacagctacgttaaccgggtggaaaatctgtatttccaaggtagtcatcatcatcaccaccactga

SEQ ID NO: 1116 - DNA, 3003 bp, Artificial Sequence
  6xHis UPI0003ED860D
atgcgtaagtcacgcagtctgggcttaggtcttgtaaaatacattcttattgtggttgccctggttggttgtattcaaacctccccgacgatggatgaatcggccatcaaccaccaggctcaaacaatttacctgcgcggcggcttcaatgggtggtcgacggccaccgcgtttgatcgtacagaacaggcgggtatatatgtggcgaaaactaagatcactatgggcaatcatgggttcaagttggccccggcggactggagcttcgcgtgggtggtttccgcgcacgaaaaccagctggtggaactgaataaaagctatcgcctcaacaccgcaggcggcgaagaagattcgttgttcattgaaacacgcgggctttatcagtttactcttgatattacccaggcaaatcagccgaagctgttggttaaactgttgtcggccgatagcgccaaaactcctccaccgcactatggagagatgacaagcctcgaatttaaccgttttaacggtgaaaaggtggaagcggtcttctccgcgaaagcgaccaacaacggtctgcgcgaatatgtacattcgaccacgcagagcttgcgggatccggtgccgtcgtactctcgctatcaggaagacatagcgcacccacgtgtacgcagcggcaacatagcctttgacgccttattcgccttggcggtggatgagatgaaacttaattctgtggaacagattaaagatggcaactataataatggtcaggcgatcgattgctcctgcttcgaaactggtgagaaatggaattacgtttggacccgggatctgagctatgccgcccatctgagtttagcccagttcgatgctcaacgtgtagagaacagtctccttttcaaagttagcaacttacgcgcctcggcgccgattagcccttttctggccggtaacgcgccgtatacccaaattattcaagacaccggctcgggcggttcctggcccgtaagcaccgatcgcatgacctgggcttttggagcgaccgcactgttggcaaatctggcggaaccgcaacgttcacaattcgcacgtaaagcttttaccgcgctggtaaacaccattgaaaatgatcgccttgtcgcgttcgatagtcatctgggcctttacctgggtgaacagtccttccttgattggcgtgaacagagttatgccagctggattgtagatgatctgtcatctatgtctacagctatttccctgagtactaacgccggccactatcaagccctggtgctggccgcggatctggctggtcagttaggtgatgtaccggctgcaaaaaagtataaaggatgggccagtgcgctgaagaacgccataaatcagcacctgtggctcgaagagaaaggcctgtactcctctctgacgagcggacactatcacaaggtggcgttggagaagtttgactggctgggtcaatctctggccattgttaccggtattgcaagcgatgaacaagcccgggcgattctgtcctcatacccgcacggcccaatgggggcagcggtgatctttccgcagcaaccgaatattcctgtgtaccacaatcgcgccatttggccgtttgttacggcgtatggccttaacgcggccgtaaaaggaaaaaatgtcgcggttactcaagcggcgctggataccttaactcgcgcagccgcactcaatctgtccaacatggaaaatctggaatggctgtcaagcgaaccgattctgctagataagactcacccccaactgtctggcccggtgattaattcgaaacgtcagctgtggagcgtggccgcgtacctgaacttagtcagcaacactattttcggtgcacagccaagccagcaaggtattgagttccgaccgttcattccgaaatcgtttaaggatcagtggttcaaacattcacaggtcattaaccttattaattatcagtggcgcggcaaacagttcgacctgcagctgaaattcgcgccgtctaacaaaaaattcggagcctacgtggtaaatcgtgtaaaagtgaacggcctggcacattctggtgtgctcgttgaacaggcactgaagcagcataacctcatcgaaattgagttagtcttggataataccgtagataataacatcaacctggtggatagtgaaccgctggcgttcgaccccctggtctatgcgcctttagaacctaaactctcggtcgtcgctaaagcgaatgactatgtgatccagatcgaagacaaaggaaatgccaatctgacctctgcagccatcgaatacgaaatttatcgtgacggcaatctgctgacccgggtgccggccggagcgggagtgagccagtggctggataaaggtcaggcccaacaagcacactgttatgccgtggccgcacggtttgttaaatcgcagaatcagtcccatctgtcagaagtagtgtgcatgggggagcggatgcagattcctgtggcggaccaacgcattcagagcaataagccgaaaaaaatcctgggcgaacagctgatcttcagtcagtggggcgaagccgatgatacgttacaggtgcactttagcattgatcaacccggtaaatatgctatccagtttaattaccataatccggccaacgcgatcaatttaggcatttctaacggcgtgaaatggctggaggtagtcaacagcagcaaccagcagtcagtgaaacaggccgctgtccagttcccgcatacacgtgtggataaaacccagtttggggacaacctgtccaccccggtagaaattgaactggctgcgggtgactacaaactgcatctgcatgacttttataacatgtcctacctgcagagtaataaaacctacacggcggctggcggtatgaaaggcatatcaaacaaattcgacatctacgccgtgacgtttgtgctgctgccgctcaaagaaaatctctattttcaaggcagtcatcatcaccaccaccactga

SEQ ID NO: 1117 - DNA, 2442 bp, Artificial Sequence
  6xHis UPI000217D8B1
atgaatctgtttttgagtatctttctgttctgctcaccgctgttcctgttagggcaatctgagctgaactatccagaactgctctatccgccccaagcgattaaagcaaattgggtcagtcacccggacattcagggaggggaagaccgcattgtattattccgtaacgaatggatggttgatgaccctagtgaagcgtttattatcaacattagcgcggacaatcactatttcctctacgtaaatggcaatttggtgacgcatggcccgcagttgtctgatattcgtcattggaaatacgagacgattgatctcaagacatacctaaagacgggtaagaacctcatcgcgatcaaagtggttaactacggtaagcgccgcttctacggcatgcagtcgatctttacttctctaatggtgaatggcgcgaccgagaacgccaaagtactgaatactagcggtaccgacgacggctggaaatgtagtatcgacgattcttatcgcgcgctggaagtgaactggcgcggcggcggtccaaaaagcatcgtgggtggcttctatgcgaacaacccgacggacttcgtggataaaaaccactatccaaccgattgggagcagccagattttgatgatagcgattgggtggacacacagttcttcgaaggggcgagcagcatgggcggttctatggcgtacttgctggaacctcgaaatcttccgctgctgacatgggagaaagaaggtattggtcacaccgtacgcaccagcgatattgacgtgtcggaatttccggtgagcggtaaaaccgtagtgcccgaacacaaaaaaattcgttttctgattgaccagaagtacgtaaccaatggcttcccggaactgatttttagtaaagggaaaaacgcgcatattaaaattaagtacgcggagaacctgtttggcccaaaaaataccaaaggtgaccgcaacatcatcaaaggcaaagaactactgggctactacgaccatgttgttagcaacggtaaagaaaggcagaagttcaccccgaattggatgcgaacttttcgattcgttgaattcgaaattgaaaccaaagggcaggagttggtgttagacagcttctcaaactatcgttcacgcacccatatcccgtcgattgcgcgcttttcaagtaataacgaaacgtacaacgccatcttcgatatttgtaagcgtaccgtagatatctgcacccaggattacttcctgagcgatgcgtactatgaaactatgcaatacgtgggagacacgaagatccacgcactgctgtggcaggctatgtcaggtaacttagcacataccaaaaatgcgatcgaacagttccaccgcagccgcgatgcagatggtaacatcttgggcgcgtacccgttacgctctacctttatttatccgacctacagtttagtgtgggttgatatggtgtacgattactaccagcttaccaacgataccgactttattaatacctataaagatggtatcatccacacgctggctgggttcgaaaaaaacatgaatgaactcaacctagtaaatgaaacccagtatcgctactttgttgattggtatacaggacctaacaatggtggcggcacagccacgaaaaataatggcaaaaattcggcggttgtgagtctgcattatgtccacgcccttcagaatgcagcgcgcttattcaaagcgatcggtgacaaacataccgccgatacatacctggatcgagccactgccatcaaatcatccgtgtacaaactctgtttcgacccaaacaaaaacatttttgcggagcgccctgataaaactgtctatgatcagcataccaatattatggccgtcttaaccgatgccatcgccgaatcggagcagaaagcactccttagcaatatcctgaatgatccgaaactgctccaggcgacatactactaccgctattacctttttgaagccataaaaaaagtcggcgcgcctgagctgtttgacttggcgcaacgcccttggcaggcgatgatagacaaccacatgaccacaactttagaacgcttcgagtcagacaagaaaccgacccgcagcgaagtacacccgtggagcgcatcgcccgcctacttttattttaattacctggcgggcatcaaaagcgtgaaaaacgactttcaggaaatcgaaatagcaccggttttcggcatcctcgaagatatggaaggtctgttaccgacctcaaaaggcaatattctttttcatctgaagaagatccgcagcaagctcagcgcagaaatcattgttccaaaggagatgtctggagaactggtatggaatgagaagcatattccgctgaaacacgggcagcatacgtatatccttaaagaaaatctgtattttcagggctcccaccaccatcatcatcactga

SEQ ID NO: 1118 - DNA, 1281 bp, Artificial Sequence
  6xHis UPI000005B845
atgcagaaactggtagaggtggcaaaaggttactcgtgcacgtctgtgaatacgaccattttccgtaacaatagtttggtcacgcacggggacgaacaatacattagctactatgatgcggatggctatctggtgctggggaagcgcaaactgaactccaagcagtggacactgcaccgtacccagtaccgtggaaacgtgaaggacgcgcataacatcattagcattatggtagacggtgaagggtacctgcatgttagcttcgaccatcatggccacaagctgaactactgccgcagcatcgctcccggcagcttagaactgggtgataaaatgccgatgaccggcgtggacgaagggaatgtgacgtaccccgaattctatccgctgaccgatggggacctgctgtttgtatatcgttcggggagctcaggccgcggtaatctggttatgaatcgctattcactgaaggaccacaaatgggcacgcgttcaggatgttctgattgatggcgaagataaacgcaacgcgtattggcagctgtacgtggatgaaaaaggcacaattcacctgagctgggtgtggcgcgagacatggcaggttgaaactaaccacgatttgtgctatgcgcgctccttcgataacggcgtgacctggtataagagtgacggcgagcaatataaactgccgattactgcgtctaatgcggaatatgcgtgccgcatcccacagaatagtgagctgatcaaccagaccagcatgagtgcagatgccggtggcaatccgtacattgcaacttattggcgtagctcagatagcgaagttccgcagtatcgtattgtatggaacgacggcaaaacttggcataatcgccaggtaacggatcgcaaaaccccctttactctaaagggcggtggcaccaaaatgattccggtagcccgtccgcgcattgttgttgaagatggtgagattttctacatcttccgtgatgaagaacgcggtagccgcgtgagtatggcgcataccgctgatgtggctaatggtaagtggatcgtaaccgatttgactgatttcagtgtggatgcgtgggagcctagccatgataccgaactgtggaaaaaacagcgcaagctaaatctgtttgtgcaacatacctgtcaaggtgatggggaacgcaccgcggaaatcgaaccgcagatgatttacgttctagaagcgaacaccaacacaaaaaaggaaaacctgtactttcaaggcagccaccaccaccatcatcattga

SEQ ID NO: 1119 - DNA, 2406 bp, Artificial Sequence
  6xHis UPI0001CD02E9
atgaaaaaggactacatgaaatatcagcaaaacagcaaacgcgaagaaaaatcaaaattcatcactaaccagcttaccaacatggcccacatttctattaggtcatatctgtatctgcttggcactacgctcttttcatgcgcgccccaggaacttaaaaccccatttgaactaaaatgtgaaaatatcccggtcccagttggggtggatacacagacgccgcgcctgagctggaaacttccactgcttgaagaagattcaatcaatcgtgtggaaatttggctgtcgacagactcgacgcagctgagcggccgtcagtccgggtattggaacaaaagcattattggagcccccatccgcgttagctatgatgggcaaccgttagattcttacacgacctattactggaaaatcggttaccagacgagttcgaaacagaaaaccacctttagccctatctcaagctttacgaccggttgcctgagccctgataactggaaaggcaagtggatcaccgacaaacatgacattacctatcgtcctgcaccatattatcgcaagagctttcagctggacaaaaccatcgagcaggcgcttcttactatcgcgagtgccggtctgcatgaattatcggtaaacggtcagcgtgcggggaatcattttctggatccgatgtatacccacttcgataaacgcattctctccgtaacccacgatgtcacctcattgctgagcttgggcgaaaacgttatcggtgttcagttaggcaacggttggtataaccatcagagcacagccgtttggtttttcgacaaagcgtcatggcgcaatcgccccaaatttaccgcacaactgcacttacgctatacggacggtacaaccgaatacctgggcaccgattccacgtggcagaccacagattcacctgttatctttaatagcatatataccgcagaacattatgatgcccagaaagaactggcgggttgggactccccggggtttaatgccaccggctggtaccatgcacaggagacagagagccctactgaaacgatcaaatctcaggtgatgcatccgattcgtgaaacggcacgttatacggccacccaatgcaagaaaattaacgatagctgttacgtataccatttcccgaaaaatattgccggtgttaccgagctcaaggtgaaaggaaaaaaaggcacaaaacttcgcctgaagcacggcgaactgttagataaaaacgggatggttaacatggcgaacatcgattaccactaccgcccgaccgacgattcagacccgtttcaaaccgatattgtgatcctgagcggtaaacaggataggttcatgccgaaatttaactacaaggggttccaatttgtggaggtgtcttccagcgctcctatccaactgagcgacgagaacctgatcgccgtggaaatgcactctgatattcccgccataggctactggtcaagtagttctgacttgctgaacaaaatctggaaagccacaaactcatcatatttagcgaacctgttcggttatccaaccgattgcccccagcgagaaaaaaacggatggaccggcgatgcacatattactatcgaaactggcctgtataacttcgacggcatcagcatctacgaaaaatggatgaacgatttctgtgatgagcagaaagacaatggtatcctgccgtgcatcattcctacgagcgtgtggggctacgactgggccaacggcgtcgattggacctccgcagttgcgattatcccctgggaaatctaccgcttttatggggatacgactctgttgcgtcgtatgtatgggccgattaaaaagtatgtcagctacattgaaagtatcagcaccaaccatctgactgattggggcttaggtgattgggtaccggtgcgcagcaagagcaatataacccttacgagctctatctattactacactgatgtatgcattctggccaaagcagcccgcttatttggctacgccgaagatgcaagctattacaacaccctagcgcagaaaataaaagaagcgattaacacctcgttcctgaataaggaaaccggcatttatgccgaagggacgcaaactgaactggcaatgccgctgtattggggcatcgtccctgaagaagacaaaaagaaggtggcggcccgcctgcacgaacttgtggaaaaagatgactaccacctggatgtgggtttattaggttccaaggcgctgctgagcgcgatgtcggataatggttacgcggagactgcctataaagtggcctcacaggacacgtatccgagctggggtgtgttggaccagacacgctgctacaacagcactgaaaatttatacttccagggcagtcaccatcatcatcatcactga

SEQ ID NO: 1120 - DNA, 2775 bp, Artificial Sequence
  6xHis UPI00018E07C6
atgacggccccggcgcgcctgcgtgccgaacatctgcgcgaggcgatgggactggccgttcgtgaaccgcgactgagctggaccccgcctgccgcgaccgccggacaaacagcctaccgtattatggcggataacggttgggacaccggccgcatcgccagcgccgaaagcggaggcatagcctatggtggccctgctctggattcacgatcccgctttgattggcgtgttcgcacatggaacgtggatagcgatggtaccgaaacagcgagcgattggagcgaaagtatgccggttgagcttggcctgttacacccttcagattggaccgggcaatggattagtcccggtgaggaggcggtgagtccgccgggcgaacgtccgggttatgctctgactcgcaccttcacccttcccgccgcccctgataaagcacgtgcgtatgccacggcacatggcatttacgagctgttcattaatggtcagcgtgtgggggatcaacagcttacccccggctcaacgtcctacaacacgacactgcaggttcaagcatatgacgtgacagcgctccttacagctggcctgaacacgatccgcgccgtgttaacggacggctggtatcgcggcacatttggatatacccgcgatgcagatatgtacggtacacacaccgctttcttggcacaactggaattagaaagtgaagccggtcgtcaggtgattggaaccgacccttcttggttggtgtcggccaccgaagtgattagcgcggacttgatggcaggtcagcgcgttgactttagagcgtatgacaccggcagtgctccatcagcaggtaaagctccaggcgttcgcgctgccgttgtgcgcccgggcagttttggggccctgacgggtccactggcgcctccgacccgtgtgactgaggaactggccccggtctcaattactcgtctgcgcaatggacaccaggtggtggatttcgggcaaaacatccacggctgggtccgcctcgctgccctgggtggtcctggagagaccgtcaccctcgaatatggtgaggcactaggccgtgacggtgatgtcacccgcgaccacttgcgtccccacgattttcgggttcccggtgccttcttagatgccggccaagtagacaccgtgactgcgtcaggcgcccctggtgaagtgttcgagcctcgtcacacctcgcatggattccaatttgtgtcagtgcgtggtcttgcgacagatctgcgcccaagggatgtcacagcctgcttggtacgcaccgacttggaacgtatcggtacgtttcattgcagcgatgagcgtctgaacaaattgcatggcattgtggaatggtcttttctcggtaatagctgtgaggttcctaccgattgcccgcagcgtgaaaaagcgggctggactggggattggcaattgtttgtgcctaccgcagcatatctgtacgatgtaacgggctttacccgcaaatggcttcgcgacgttcgtgccgaccagtgggataatggggtcatcgccaatatctcgccctcgcccggtccggcgattacaagtgcggaattcatgggttttactaacggatcttcagggtggggcgacgctattgtaatggtgccttgggaggcttacctggcgactggagatgctagtattttagccgagaactgggatgcgatgaatcggtggttaggcttcgttcgcacgaccgctgagacacgtcgtcatgcggctcgcgcaacacaagcaccggttccagcagatcacgagaaatacctgtgggatactggcttccatttcggtgaatggatggaaccagacggtccaggtcccgatctgtttgcctctcgtaccgcagacaatggcatagtggcaaccgcctattatagacataccacagacctgatggcacgaattgcgcgtgcgctgggcttagcggcggaagctgcggatttggcccgattaagtgacgcgattcgtgatgcctgggcgaccgaatacttagatgaaagtggtagagtgaccgttgcaagccaggctaactgtgtgcgcgcattggcgtttcaattggcgggcactgagcatcgcgcggctgtgacgacccagttggttgaattaattcgggatgcgggcacccatctgggtaccggctttctcgccactccgtacttacttccagttctggccgatcacgggcatttgggtctcgcatacgagctactgatgcaggacagcgaaccgagctggctggccatggttgatcgtggcgccaccaccgtgtgggaattatggaacggcctggatgctggtggagccccacatcaatcactgaatcattatagcaaaggcgccgtggtgagtttcttacatcgctacactgcgggtttacgccaagcgccgggttccgcgggttggaatcgtattataattgaaccccgcccaggcgcaggcttaacatccgcagcaaccagtcatcaaggtccgcacggacctattacagttgcgtggaccctgtcgaccgacgcactcggcccggacgaaatgaccgcggatggcgtgctgaccctgactgctgatattccgtcgggaaccactgcggaaattcttctgcccggacagccggccgcggtggttggccctggccatcacgttttcagcgccgccacgggcggggataccgcacaccctgagttaatgcggtcgacgctagaaaacctgtattttcagggctcccatcaccaccaccaccattga

SEQ ID NO: 1121 - DNA, 2808 bp, Artificial Sequence
  6xHis UPI0001815896
atgaaaagcagcaacatctatagcccgttcgatctgaaatgcgaattcactactaatccgctgggtgtggataaaaaaaacccgatcttttcctggaagctgcgccacttagaaaaaaacgaaaagcagactgcctaccaggtgatcgttagctccagtcttgaaactattaacgataatattggggacgtctgggatacaggtaaagtccttagctcagagcaagtgattaagtacgaagggaaagaacttgaaccgtgcaaggtgtatttttggaaagtgcgatggtgggatagcaaagatcaggagagcccttttagcgtggttaacaccttcgaaactggcctgatgaatgaggagaactggaaagcgaaatggattactaagaaggagcacaagtacgaggtttacagtccggacggcgctccattcggcttgaattataccattgcctatgcgccgatgttccgcaaaagctttagcatcagcaagaaaatcaaacgcgcacgcgtatatattgcaggtctggggctgtacgaactctatattaacggcgagcgcatcggcgatcgcgttctggatccgggacagaccgattataagaagcgtgtgctttacaccgtttacgatgtttcaaaaaacatccgggatggcaagaacgccatcggtgttattctcggtaacggacgctacgtaaaggaatacggctatgatttcccgaaattgatcatccaagtcctggttgaatatgaggatgacagcattgagtggattgttagcgatgaaagttggaaaaccacttatggaccgataacccttaattcactgtatcacggcgaaatctacgatggccgcaaagaaattaaaggttggaatttgccagacttcgatgatagtacctgggagaatgcgattctggcggaaccgccaggcggtaagctctattcggaaatttaccctccgattcgtatcaccaaaaccatcaaaccgattaaaatgtggagcccggagccaggtacctacgtttatgacttcggacagaactacaccggatggatcaagattaaggtgcgtaccaacgaatccggtaaagaaatccgtattcgccacgcggagctcacttacgaagacggcactctgaactattctacaaaccgcacggcccttgcaacagatgtttacattaccaagggcgaaggctatgaagaatatgaaccgcgttttacctaccacgggtttcgttacgtagaaattctgggctacccgggcgtacccacactggaagatatcgagggtaaagtagtccataccgcggttgaaagcaacggcgagtttatttgttcgaatgaactgatcaataagatccaccataatataatttggggacagctctctaacctgatgtcgataccaaccgattgtccgcagcgtgatgagcggatgggatggatgggcgatgctcaactgtcagcagaagaagcgatattcaatttcgacatgattggattctatcgaaaatatctgaacgatatccgtgatgcgcagaaagaaaatggttcactttctgatgttattccgccgtactggagtatttatccgggggatcctgcctggtctacggcatatattactattgcgtggtacttgtatcagtactatggagacaagtatgtcttagaagagcactatgaaggttttaaaaagtacgtggagttcctgaaaaagctggcccctgattatattgtaagcttctataaatatggcgattggtgtcaacctggcaccgtgcgcccgaaagacaatagtggggaactaacgtcgaccttttatttctatcatgacgtgattaccctgtcgaaaattgccaaactgctcggtaaagaagcggactacaagtattattccgaactggcagataaaattaagtctgcgttcaacaaaaaattcctcaaagagaaagcgtatgcctctatccctacggaactcagcgaagagaatgtgaaagcactgctggagaaatacccggaggatattaaagattttctgcgtcagcaatttaccattctgtcaagcctgggcatgtttacctcacagaccttaaacaccctgcctttatacttaaacctggtgcccgaggataaagtacaggacgttctgaagaccctacttgaagatattattatccgtcatgactaccatttggatacgggcatcgttgcaacccgctacatctttgatgtacttacatcatacggttacgatgaagttgcgtataaaatcgtgaatcagaaaacctatccgagttttggttacatgatcgaggaaggcgccaccacgttatgggaacgttgggaaaaactgacgagcacgggcatgaactcccacaaccatatcatgtttggcagcgtggatgcatggttttaccgtgtaattgcgggggtgcgcgtcggtgaaccgggctggaacaaaataatttttgagccgcatccagtgggcgacctaaaatatgccaaagctcgcctgaataccattaagggggaagtggaaattaattggcaaaaaaccgaaaacatcttcagcatgcgtatttcggtaccagtgaacagcgaaggcgaggttcacgttccaaaactgtttgagcgcttcgtagtcaaggagggcgacaatatcatctacgagaaaaaaggcgatcttgaagagaacgaaaaatatatcgtcatccgcgttggcagcgggagctacaacttttacatggaaaaaatagagaatctgtacttccaaggttcacatcaccatcaccatcattga

SEQ ID NO: 1122 - DNA, 2841 bp, Artificial Sequence
  6xHis UPI00039231C1
atggaggaacagaagcttcagaccagtcttgatttcgataaggttttactaaacgccaaatctaatccgatcgctattgagtcggaaagcccgctcttcagctggattattaaagccgagggtttcggtaagagccaatctgcctaccacatcctggtggcgtcctcactggataaattagatgaaactcacgccgatgtgtggaactctaacaaggtcgaaagcagtaaaagcacctttgtgaaatacgagggcaaggaacttaaagcggcgacccgttattactggaaagtcaaagtttgggataagagcaaccaggaaagcaattggagtgagccccagtattttcagatgggactactcgatgaatcaaactggggtgaagctaagtggatcactctcaccaatgacacccgcaccagcgaatatcgttttcgtgaatataagaccggtcggatggagcagccaattcaagtcgacggctttgcggcctcttacttccgtaacaagatcaacctgaacaaagaggttgacaacgcgcaggtgtatatttgtggattaggctattatgagtttttcctgaacggtgaaaaagtaggcgatcatgttctggatccggcaccgtcgaactatgacaaacaagcttattacgtaaattatgatattacggagcagctgaattcgggcgagaatgccttgggcatcattttaggcaacggcttttatggacaaaatatctcgtggaaaaacgatccggagtctgatcgcgatttagcctacggtccgccgaccgtgcgtgttctgctaaaacttaaatataaagatggcacagaaagcgaattctttagcgatgagacctggaaagagagcaccggcccgatcgtatttaataacatctacggcggcgacacatatgatgcccggttcgaattaggcgactggacgtcaaccaactatgatgacagtagttggggattcgccaaagagaccgcaccggaaattaaaaacattagcgcccagcaaattccggccattaaaaaattacaggattacgaaccgcagaatgtgttcaaaggaagcgatggcgagtggatagtagattttggccagaatatcgcgggctgggtcaaattaaatgtgtcagagaaagagggccagctgatcgaagtcattacgaccgaagcgctgctgaccaatggccgtgacattttcccgggcagcacgggaggcggcgccaatggaatggcgcagatttaccaatacatctgcaagggagatggtcaggaatcttgggaaccgaaatttagctatcatggcttccgctacgctaaaatcaaaggtgtgagcactaaaccggacgcagatatgataaaagcagtgctggtagcgacagatattcaggaaactggtagcttcgagtgctcggatgacctgtttaacaaaatgcataacatctccaaatggaccattgtggacaatgttcatggcatcccggaagactgtccgcaccgcgaaaaatgtggctggctgggggatgcgcatgcgttctgcgaatatgcgctgtataactacgatatgtacgacttctataaaaagtatatggaggacattcgaacacagatgctgccgactaagggccacaacaaccctgagctaaaatttcaggtgcccacgatgattgcgccgggtaagcgtaccagttcttacgcgaaaattgattggggcgtggcaactatgtatctgccctggtacaactatttgtactatggtgacgatgcgatcgtgaacgaatactatcctgagatgaaggatttgacgaatttctacttaaacttcaaaggcgaaaacggcattatgcaagacgggatgggggattggtgtccgccgcgctgggatcgtcgcacgaatccggaagctatggagtgtgatcctattatctctgccaacgcgtatttttatgatgtgctggggattatggagacgtttgccaaaatgaataacgatggcgcatttcaaagcgaaatgaaggcggagaaagaagcgttaaaagacgcatttaataaggcctttctggtggagatcccgaacacggattttaagtggtatcagtcacagactgcaacggtgcaggcactgcagttcggcatggtgcccgaggaagaaattgagaatgttgtcaatggcctggaatacgacattgtagaagtgaaaggcggccaccatagcactggcattcacgggaatcgctatatctataccgtcctgtccaaatatggcaaagctgaccttgcgtatcggatcttaactacaccggattttcctagccagacctacattatgaactccggctttactacctggccagaacggcaattcgagtgggaaaccatggagggtcctacgaatagcttaaatcacccgatgcatagcggtttctcagcttacttctttgagtcgctgggcggtatcaagtcgtcaacaaaagaggcaggctataagcagttcatcgttaatccggagtttccgagccagattacccagaccaaagtgtcagtgccgaccccgtacggcgatatcaaaaatgactggagttttgaagaaggcaaactgtcaatgacgctggaaattccgtttaatacagaggccaacctggttctgaaccaggcggagctggagtcgcttatcatcaacggcaagacattccagaatctgcagaagaacaccaaaagtgttacgctgcagggttctaatgtgattctgggctcgggtaaatacaaaatcctgtacaataaacgtgagaacttatacttccagggctcgcatcaccaccaccatcactga

SEQ ID NO: 1123 - DNA, 2751 bp, Artificial Sequence
  6xHis UPI0000DBA6EB
atgacaacgccgacgcacttacgcttggaacacctccggccgggcgagccttgtggcacgacccatccgcgtctgtcatggcgtttgccgactggcagcactggtcagcaggcgtaccaggtccgcgttgctggcgcgtttgatcgcacttcatcgacgctatttacaaccgagatcatcgagggacgtgaccatgtgctcgtccgtccgtggaccgccacacaccccgcaccaaccgcgggagaagcccgcacttggcaggtgcgctgctggacggatttgggcccgagcgactggtctgagccggctacctgggttacaggactgctccacggcggtgatctgactgccgattggattgaaccgtatgagccggacgttcctccgctgggccatcgtcccgtgtatagactgcgcgcctcatggcgtccgcgcgcagaaattgcacatgcgtcattatttgcgaccgcgcacggtatctatgaattttttgtgaacgatgtccgtgtgggcgatcatgaactcactccgggttttacgtcatatcgtgcccatctgcaggttcagcactttgatgtgaccgaccttttgcatccggaacataatgatctgggtattttgctcagtgacggctggttccgtgggcgccacggctttgaacgacatggggattctttcggtgatcgtgtcgcagccctggccgaattacacgttcgctacgcagatggcacgagcgaacgctttggaacgggggatggatggaccagtaccccgtctgagattgatgcagcagatctaatggatggccagcgtgtggatttacgccgcgtcccggcaggcgaagttcgtcatccagccgttgtcgcgcggggcggtttgtatgatgaccgttcacgcctgacgaccggggtcgcaccgccggtgcgccgcattgagacgctagcggctgtcgctgtgacggaacctcgaccgggtacttacgtggttgatttcggccaaaacgttaatggctgggtaacagcggcggatttaggtccagcgggtacgcacgctactctgacccatggtgaatctttggcggcagacggttcggttgatacagatcatctgcgagcctttgaatttgctacgggaaccggtttgcccgcaggacaagtggatcacgttgtctccagcggccgagcgggcgaagcatttgagagtcgtcacacaacgcatggctttcgttacgtacagtttgatggtctggcgaccaagccgggtcccggaagcgtgaccgcagctgtagtacatacagatttagaacaggtggggagctttggttgcgataatgaccgtctggcaaagttacacgccgcagcggtttggtctttccgtggcaatgcgtgcgacgttccaaccgattgcccgcaacgcgagcgcagtggttttacaggcgattggcaagtttatgtcgaaaccgccgcatttactcatgacgtggccggtttctccgataaatggctccgcgatctggctgccgatcagtggccggatggtaccgttccgaatattgtgcctaaccccgccgggaatcagccatcaggtaatcatttcgcagacatagccaatggaagtgccggctggggcgatgccgccgtaattgtcccgtggcagttgtggcgtttatacggagatgtggaagttctggaacgccagtacgatagcatgacacgttgggtagaacgtgcggccggcgcggcacgtgaccgccgccacccggatcgagcacgtgcgcgcccgacgccggatgcgcacgaggaatatttatgggataccggatttcactggggggagtggttagaaccggatgagatcccggcgcctgacccggcgcgcgatcattcagttgttgccaccgcctacctggcccgcagtgcggaactgttagcgcaaattgccggggtgctcggtcgtgatcgcgacgaatgccgttatgccgccatagccgcaggagccgtacgtgcatggcagcgcgagtttatcacccccgaagggacgctgacacaccctacccaggcaaattatgtgcgtgcgctggaatttgatctagtaccagcagaaggccgccgccgctttgcggatgaactcgctcaattgctggttgacaatgactatcatctgggcactggctttttggcaaccggcatgctgctcccggccttggcacgaaatggccacctcgacactgcctaccgcgtgctcttgtccacgggcaacccgagttggatggagatgattgaccgcggcgctaccaccatttgggaacgttgggatggtgtggatgaaaacgggcgtgctactgcatccttaaatcactatgccaagggcgcagtgatttctttcttacatcaattcgtggcgggtctccgcccggcagaaaccacggggccccataccgtaggctaccgtcgttttgtggttgacccgcgcccaggtggagacattaataccgcgcatgccgaacattgcagtccgtacggcaatattgcggtacgttggaccattgccgatgatgttttcaccctgtctttgaccgtaccgagtggcagtgaatgcgagttgcgtctgggtgacacgacagaactcttacggtctggcacctatacccgcacgtgcccagctgcacgcgttacgcagcgctcaagtcgtgccagcccgacccgtgaaaacttgtactttcagggcagccaccatcatcatcatcactga

SEQ ID NO: 1124 - DNA, 2805 bp, Artificial Sequence
  6xHis UPI0001D10896
atgaagctggtgcgaatcgaagtcaaccacatggagaccccgatcggcttcaacctggataaccatctgcatttggttggtttcctggatggcccagtaaccagcaaactgcagcgaaagttaatcattaaagcgcatgacaaggaaatcgtgacctttgactgggagaatgctgacaacttgatcttcgacttcccgattaatctgactgcgcgtacccgctatgaagtggagatgagcgtgaaaaacgaccgtgaaatgagcaccgcgaccacctattttgagacgggacagatcgatgaaaccctcaagggaaagtggataggcacggaacataaagatctgcatagcattattttgtataaaaaatttaccactaaggacgtcaaaaaggcccgcctgtacattagtggcttaggtttattcgaagcatatctagatggtaacaaaattggcaacgaatttcttactccgggttttacggattacaattacgatcttcaaattgaaagttatgacctgacgacggaacttctcaaatcgggtgaacacactctggctatcatgctgggagatggctggtatcgcggcaagctgggcttgaaggtgcacggcggccagccgaataattatggggatcagctcatggccattgcggatctgcgtattaatgacgatcaacaaattattgtcactgacaaatcatggcaggtgacgacctcgccgattacccacagtggcatttattatggcgaggatctggatgacaaccgtcaactgaatgaactggcaaacgccatcgagcttacttcgccgacgaaacacctggtcgatcgacagagcctgccaatccaacgccatgaacagttttcagtgaaagagattattaagacccctagtggcgccacggtcctggattttgggcagaacatggccggttggctggaatttaagaacacgatcccgaagggagagaaggtgagcattgagtttggcgagattatgctagatggcgaattttaccgtgataatctacgttccgcacgtgctcagttcacctacgtatctgacggcaaggaaaaatgggttcgtccgcattttacgtacttcgggtttcggtacgtgaagctgaacgatttcgaaggcgaaatcgatcctaacaattttcgtgccgttgccctgtactcgaacatgattgaaacgggggaaattattacaaacaacagtgatgtgaatcgcctgttcgaaaatgtgaaatggggccagaaatccaactttatcgatattccgaccgattgcccgcagcgcgatgaaaggttaggctggacgggtgatgctgcaattttcagtaaaaccgcatcctacaacatggatacctatcagtttcttaaaaagtatgcctatgacatagcggtggaacagagtaaaaacaacggttttgtgccgctctatgtgccggcggttgataccaaagacggaggcaaagcggtctggtcagatgccgccaccattatcccgtggattgcctacaaacgtacaggagacctggcgattctgcggcaaaacattggggcgatgatgtcttgggtagattggatccatgaccgagccgtgtcccacggccaagaatatttgtggctcggcgacgatcagctgggcgattggctggcgctagacaccgaggatattatgaagttaaaaggcaaaacgcccgacgatctgattgctagtgcgtactactattattcagccaaactggtatctcagagcgccgaaaccttaaatatgaagcatgaaaaacagtactacggccagttagcaaaactgattaaacacgccttcattaaccattttttcaccaaagatggcctgtccatcgcggatacacagactggtttggccctgtgtcttagttttaaactttacccggccaatgcgaaagacaacctaattaataaacttgtggagaaggtcgaggtcaatcaaaaccatctgaataccggctttgttggtacgccgttattactgccggcactgactgataatgggcaacaagacttggcgcttcgtctgttcctcaatacggatttcccttcgtggctgttcgaggttaaaaacggggcaaccacgatctgggaaagatggaattcggtcgatagcgaaggtcatatcgcgcaaaatggcatgaacagcctgaaccactattcgagtggggccgtgatggagtgggcgtatgaagatttgctgggtctgaagcagaacggcaatgacgcggtgtttaaacccatgttaactgcaaaattgaaccaaatctcggggcagattgcactgccgaccggcatcgttaaagttgcatggcacattaaaagctctaaacttattcacctggagatggacataccgtatggtagtcacctgaaattgatcttgcctaagcatgagcaggatataccaacgatttttaagtcaggccactacgaactggatgtcgaagtgattaacccgatcgttgaggcctttgacgttcacaccccgttagctgagtatcgtaatcagactagcctgacgaagaagttgagcgaactggttccgttctggggctttctggcaatgcccggtaatatggatcactttgccaaatattcactcctgcagctgagccgcgagatgcgcggtattggctttaagccgttcacccaggaagatatcgaaaaaattaatcagctgtttaaagaataccactttaaaggggcagagaaagaaaacctgtacttccagggtagccatcatcatcatcaccattga

SEQ ID NO: 1125 - DNA, 2355 bp, Artificial Sequence
  6xHis UPI0001B17DE6
atgcaggttaaaagcggtacgattgtttatccgcgtggaagcttcgatgcagattggattagctgccccgatgttaacctcaagagctacggggttttccacatgcgtaaagttttcgaactcacttcacgcccgaaacagttcgtagtgcatgtaagcggtgatcagcgctatcgccttttcgccaacggcacacctgtatgtttcggtccagctcggggcgatcttcgcaactggaactatgaaacgattgatattgcgccgtacctgaagaccggcaaaaatgttctagcggtgcagttatggaatatggggtcaggagcaccggcagcccagctgacgtatcagaccggtttcattttgcagggcaactcgaatgcggaacagatggttaacaccaacaactcatggcgcattattcaaaacaaaggttactttcctgagccgtttccgccctcccgtttggccagctacatcgttggttcctgcgacagtgtagtgttcaagaactatccgttcggttggcagaatattaactacgatgacaaaagttggcttagtccggtgtctgagactaaaccacgttattatactgaaaagcgcagtctgattccgcgtagcatccccatgatggaagaaaaaatcgaaccgattaccggcattgttcgcatcttaggcaccgatacctcggccattctgaactcgttcaataaaaacggtagcattaccattccggcaaataccaaggcaacgattttgttcgatcgcaagacactgaccaccgcgtacccggagatcaccttttcaaaaggtagcaacggtaaagtgaaaatcacctatgcagagtctcttttcaacagcgaaaatctgaaagggaatcgtaatgaaattaaaaacaagaccattaagggctactatgatgtgttcttacctgatggtggtaccgctcatacgtttcgccccttatggacccgcacttttcgttatattcagttcgacattaccaccggtagcgaaccaatggtcattgacaagatgcagagcgtattcacagcctacccgttcaaagaacatgcattcttcaccagcaatgacagtaccctgcacgagatttgggatgtatcttggcggaccgcccgcctatgcgcaaacgaaacctatatggattgcccgtactatgaacagcttcagtatgtgggtgatacgcgcattcaggcattaatcagtttgtatgtatcaggagatgatcgcctgatgcgcaatgctattgaacagttccatcaatcacagattccggatggccttaccatggatgcctatcctgcaggcggcggtaaattcattcctcccttcagcttgttctggattgctatgctgcatgacttttactggtatcgcgatgatgaaaagttcatcgaaaagtaccttattccgatggaagccatcttgaagtggttcgagtaccgcctggataataactctggcatgctgggtaaaacgggctactggaattttgtggattggagcttcagcccgaaaggtattccgtcgggaggcttagagggtaactcaagtatcttaagtctgcagtacgtttatgcactggagcaggccgcggaaatctttgcccatgcaaaacagcagcagaaagccgactattaccataacctgggccaaaaaataaagagagcagtgtacgcgcgctgctatgatattaataaccgtctcctagcggattccccagagcgaaaagccttcagtcagcatgcgaatatttggtctatcatcaccgactgtatcccgtttaaggaccaggaagcgaccatggagcgtatcatgaacgactcaaccttaacagcgacgagcctgtactacaggttctactatacaaaagccatgaaaaaagcaggcttagggagcttatatctgtcgagcttgcgcccttggaaacaaatgctggacttagggttttcgaccttcccggaaaccctagcgcctaatgtgcgttctgattgtcatgcgtggtcggcatccccgtgctacgatttcttggcaaccgtctgcggtattgaaccgggtacaccgggcttcgcgactgtccgcatttcgccgaacctgggtaatctgaaggcggttagcggcgaactgcctcacccccttggtccgatcaaagtttcgtacaaaaaaatcaaggagggaagctacagtgcgcatatcgagctgccggcgaatttaaatggcatctttattagcaaagatcagaaagtgattctgacgggcggtaagcaggagattacatttaagtacgaagaaaacctgtacttccaaggttcgcaccatcaccatcaccactga

SEQ ID NO: 1126 - DNA, 2265 bp, Artificial Sequence
  6xHis UPI0001A3C989
atgcagacagcgcctactaacctacgcacggacctgcttctgcacaccgataaggtttggagcaatggcttcttaaccaattacacgctggacggcgccgactcagccaagtttgcaggtcaactggccctgattcgaagttcacgtccgagctttagctgggttctcagtactgcgggcggtactagccgacagacagcctatcggcttattctgagcacgagccgccagaagaaccaggcggacgcgggtgacgtgtgggatagcggcaaagtaatgagctcccagtccgtaggcattttactcccggcgagccagaaactggacaccaatcgcatctatttttggaaagttaaagtgtggaatgaacgaaatttagagagtgatttttcacagccgaaagccttccgcacggccccccgtctgaccgcctatgaaaccccgttctacccactggttaagaccgaggaagcgcctcgtagccagcgtactttagccggtcaaaggatcgtttatgactttggtaaggacgcttttggacaggccttcctaaccgtatcttctgcctcagagagcgatacactgatcgtgcacttaggcgaagccgtcaccgcggacgggcacgtaaatgaaaagccgagcggcaccctgaggtatcgccagattcgcgttccgctgcaaaaaggcactcatcgctatgctattcagttcaagccagacaagcgtaacacggggccgaaggccattctcatgccggactacattggggaagttctgcccttccgttacgtcgaactggcgtttaaccccgcgacccgtatcgagcaaatagtgcgccaggtagtgacttatccattcgacgatagcgcgaccacttttagcagttcagactcaacgctgaaccagatttgggatctgtgtaaacataccatcaaagcgacgacgttcacaggttactacgtggatggagatcgggaaagaattccctatgaagcagacgcgctgctgaatcaactgtcacattacgccaccgatgcggaatacaacatggcaaaacgttctctgaattatttggtgtttcatgcgacgtggccgaccgagtggagcctacagaacgtactaatcgcgtggtatgattacctttatagtggtgactcgcgcacggtggaagcgttatatccagaacttaaagcaaaactgctgctgccgcttgcacggccggacggccttataagcacgcgtacgggcctccagactccggaattcaagaaaagcatccattatgacaccttcgatggtcgtccgaccattcaggacattgtagactggccgcagcagggcgtgttgggcctgggcaaaaaagaagcgggtgaaacagatggctttgtctttaccgattataatgcggtggttaatgcctttcactaccaaggcctggtgtttatggcacagctggcctctcgtctgggtaaaaccgacgatgctgcgttttatgcgaaccgcgcgggcttggtacgcaaagcgtttcaagcaaccttcattcacccgaaaaccgggcttgttcgtgacggcgaaggtacggatcatgcaagtctgcatgcaaatatgatggccttggcattcggattggtgcctgaaaaactccagtctcaggtgctcgcacatattcgttcgcgcggcatggcctgctcggtttacggctcacaatttttactggatgcgctttataacgccaatgaatctgcttacggtctggcgctcatgacttcaacggatgaacgttcgtggtataatatgttacgtactggttccacgatgacaacggaggcatgggatacccgctacaaaccgaatcaagattggaatcatgcctggggttccgcgccggccaacattatcgtccgtaaattaatgggcgtggaggcgctgaccctggcgtatgaaactgtgcaaattaaaccgcaaccggataccctccgtcaagcgagtctgcaggtggcgactctgcgtggcccgatttctgtcgcatttgataacacgcctgatcgtttcgtattgcgcaccaccctcccagccaacaccaacggtgtcgtgtatctgccgcgtaaaaaaaccaaatcccaggtgttacagaatggcaagtcagtgaaggcggccgtcgagggcaacttttggaagatcactagcgtcggagccggcacgcatgaatgggaagtgcgcgaaaacttatatttccagggaagtcaccatcaccatcaccattga

SEQ ID NO: 1127 - DNA, 2907 bp, Artificial Sequence
  6xHis UPI00019EE3EB
atgaatcgccgcacgttcatccaaaatacctcgatcgcaacgtctagcctcgttttcttcaaccagtttgagagcctggcattctccaaaagcgatcaggatttatataccctctttaaaaacccgcctgctaactaccggccgttcgtgcgctggtggtggaacgggaataaaatacagaagaaagaattgttccgtcaactgaccttactgaaagacgcgggtattggcggagttgaaattaatcccatttcgtttcctaataaggcagacgatatgggtatcaaaagcctccgttggttatcagacgaatggattgatctggtgaaagacacctgcaatgaagcgcgctcgaaagatatgacttgcgacctgatcgtcggatccggctggccgtttggcagcgaagatctgaaggaagaagagcgcgcagaagtggttcttgtatttgccgaaaaagttgaaggcccaatggtgtatgaaaccacgaaatacagcatttataatgccattgacccacaggtgactgacaaaaatcccctgcgttcaccgattctgatggacctgaaactgagccaagatcctattgcggcaatcgccactacaatagatttttccaaccagattaacaacgatattattaagattgacgttcctgaaggcaaacattgtatctacgctctggttaaattcaaatcgtttgcgaaagtaattaatggagcgccgggcgccagcggctctattttgaatcacctgaacaaacaggcggttgaaagctatctcaaccgtatgagtagcacaatgcaggatcgaattggcccgctgtcaaactacttacgtgcgttatttaccgatagcatggaacttgaggggtgtaactggtgtgaagattttccggcggaatttaagaaacgttgtggctacgatctgatgccttaccttccgtttatactgttcaaagtggggcgcctgggagccgttgtggatgaggactatggggcggaaaaaagccaggatctgaatgtgattctgaaaaaagttcgcttcgacttcgaatataccaaagccctgcttctgcgagagcgctttaccgaagtctaccttaaatggtgcaaagagctgaaggtgaaaagccgagcgcaggcgtatggccgcggtttctttccactggaaacctcgttgggttatgacatcccggaaggcgaaagttggacaaccaactaccttcgtcataagttgggcgaagaaatgtcggatgaagactatcgtcgtggacgcggctacactatgatcaacaagtacgtctctagtgcagcccatctgacgggtaagcgcattgtcagctgtgaggaaatgacgaatacctatctggtatttaatgctacccttgagctgctgaaactaggctcggatcaatctatcatgagcggtattactcattctgtctggcacggcttcaattatagcccgaaagaagtggcgtttcctggctgggtgcagtacggctcatattacagcgaaaaaaataactggtggccgtattttaagtatctgaacgattacaaagcgcgtctcagctcccagcttcagcatggcgattactacaccgatatcgcgatcttaccggcgaattacgatctctgggctaacaacggtgttcaaaccgatcctttcccggagaagttgaacgttccttatactagcctgctgtgggaagcaatcaacaaaaatggtggggcggccgactacatcaccgacatgattctcacccagagcgaaatcattaaaggtaaaatcgtgtacggcaaaaagagtttcggcgttctgtttctgccaggcgtggagtccttgagcgaactggcaatgcaaaagatcgagcagtttgttaaaacggggggaaaggtgatatgcattgaaaagtacccggccaaaggccttggctttctgaactgggagcagaaagatgcaacgattaaagatgcggtggcacgcttaaaacaacaattcagcgatcgtttcatcttcctagataaacctgcagataataagtttttagaatggtacacccccctcattgccacacaccagctgccgtcatacctgaatattagcactccaaaccgctacttcatgcagatccgctccgtgcgcgatgacggtaccgaaatgtttttcttccagaatgcacaccgttatgacgcgtatcaggcgcgcgttgtgtttgatagaaagaaaatcaaaggcaagtacgcgtgggtatgggatttggatagcggcgaacgctttcgtttgaccctcaccaacgatacgacgtttgagtataacttcggcccgaccgaaagccttttaatcatttttgatcagatcaagaatggcgaaaaatggaagccgctcctgagttcgggtaaatcgaccttaaacctggacaaggtctgggatctagagttgcgtaattcgttggatggcagcgttaaacatgttaatttgcctcaggttatcgacatgaaagatgacaaagaactcgtaaactttacaggaactgcgatctaccgtaaaaaaattacattgaccgatacgaagaacctggtcattaacctgggtaaggtgtacggaattacccagctgtacatcaataaagtgcaagtgggaattaagtggtacggtaagcgcttcttcgatatcagcaaatacgttcagacgggcacaaacgacatcgaaattcacctggtcacgacgatggggaactatatgaaaaccctgactgataacgagatcgcacaatattgggttaatcgtaagggccgcgaacaagaaatccagtcaatgggcattgttggcccgattgaaatttaccagcaaaatgagaacttatatttccaggggagccatcatcaccaccatcactga

SEQ ID NO: 1128 - DNA, 3300 bp, Artificial Sequence
  6xHis UPI0003432C11
atgtccagcacccaaaccctgcgcggccgctttgatgacccgcccgccgagtaccgagcggcacctttttgggcgtggaatgatgcgctgcgtgaagaagaagtcctacgtcagatcggtgaaatgaaggagggtggcatgggcggcttttttattcactctcgcgatggtctggaaacagagtacatgggcacggaatggatgaaactagttcgtgctgccgtggaagaagcagaagcccaaggcatgcaagcgtggctgtacgacgaagatcgttggcccagcggttttgcggggggtctggtccaggcccgtggcggcgatgattatcgcgctaagggcctcacccttgaggtcgtcccagccgaaaaagaaggcagcggtcgcttggcggaaagactagcggatggcgcgccagttgctctgttccgggccgtcattgccgagcgctctcttctctcatgcactcgcctggatttacaagtgatgtttggaagccgcatggaggcggctgcagcggccgaaaacaccttattgccgcctattttagaaccacaacaggagcaacaccaggatcacgagaccgtgtacttacttttccgtgttgaagtgagcgaacgtagtgaatggtttaatggtgaagccccgccggacaatctgaatccggatactgttcgcaccttcattgaactgacctatgaagcctatgaacgcgaagtgggcggatcatttggttcggccgtgcgaggcgttttcacggacgagccgagcatccatgatcgtcactgccgcttcaccccgggtcgcgcctggttgccatggagcggtagttttcccgcgttttatcgagagcggcgaggctcggacgttctggacacggcgccgtacctttttttcgatggttcactgagcccgcaggcgcgtcatgattattggcgcacggtcaccgaacgttttagcgaagcttactcaggtcagattggcgaatggtgcggttcacgcggcttagcgtttaccgggcattacctctgggagaacaacctaggaacagcgacacgagtctgtggggccgtgatgccgaattatcgttaccaacacgttcctgggattgatatgctgggcgaacagacgaatgaaacgattacggtaaaacagtgcactagcgtagcacatcagtacggacgaaaagtggtcttaagcgagacttacggctgcaccggctggggttttactttcgagggccagcgttgggttggtgattttcagtacgtcttaggtgtcaacctgcgaagccagcacttggccctgtacagtattaagggatgtcgtaaaagggattacccgccggtgttccattacaatacctcatggtggaagttcagtcgcgtgattgaggattactatgcacgtctcagcgcggtattgaccgaaggccggccgattcgcgacgtgctggttcttcatccgagcacgaccgcttggagtatggtgggtactggcccatacggctttccggcgcgtgggaaggatcgcgatgtatcagccgccaatcgctatggtcatgaatttaacgcgtttctccgtgggctgcttggcgcccattatgattttgacttgggcgacgaaattatcctgagcgagattggcagcgtccgccagacagaacagaccgcaagactggccgttggtatggcggagtaccgaaccgtagtgctgccagaaattcgcacaatgctcagaagcacctttcttctgttgacgggattcctcgaagcaggtggccgtgttgtggccgtaggtccgccggcagaactattagaggggcgcccggcccctgaactgagccgcttatatggccatcccggtctgaccgtagtacctgatggcgcagcggctgcggccgccctggaaagcttcctgccgcgtcgtgtgagcattcgacatcaggcgccgcaacatactgagccggccgaggcagacaagatgctgtacatgctgcagaaagccgacaaccgccgtgtactctttatcgtgaacaatgatcgagaggaagaacagcaagtgaccatcacgctggaaggcgaaggcctgctggaagagtggaacgcattgaccggcgaagttaccgatgtactagtgcgtcgctcccaagaaggcctcctggagttcgatgcctcgttcgggcctgcggatagcaaactgtacgtgttgcatactgacagggcgccggagaccggcttaaatgcatcaccggcgtctgaagcccctttactgctcgtggatccgggcacgattcgcatggaactactgcaggagccggcagggtttacgcgtaccgccccaaatgcgttgacattggaccgctgtagctatcgcctacgcgatggcgattggtcaggcgaaatggacgtttggcaggcgcagcgcgctgtgcgggaagctctgggcatgcgccaggtgtatggtaatggactcgaacagcgctatcgatgggtgcatgaaccgcatccgggtgacgggacgccagcagcatttcgcttcgattttgaggtaaccgatgtccccgagggcgaaatccacctggtcgtggaatcagcgggcgaatacgaacttggcctgaacggtaacccagtgcccggtgtaccggacggctggtttttagatcgatcgttcgatcgcgttccgcttagcggcttacgcgcgggtcgcaacgagctggttttatcatgtcgctaccaccagcgtatggaagtcgaagacttgtatctgaccggtgacttcggggtcgatgaaggtcgtcgcattacccgtgaaccagaaaaactccagcttggtgattggtgcctccaaggctacccccattatgcgggatctatggtataccgttttacagttgacggaggcctcactccagggggtccggcctggctcgaattgggctcatttcaggccgtaaccgccgaagtacgcatcaaccgtgagacagcaggtcatgtaccgtggcgtgcggcaaatcgattagacatctccggtcgtctgcgtcagggtgaaaacttgattgaagtggaggtgatggggagcccgcgcaacttactgggcccattccatcacacctctggcgatccgtcaattacttcatggtcatctttccgcaaagaaggtggcgactatagcccggcctatcgcctgcgcccgtacggattatttggcggtatccgactataccgggttcaagaacaaggtggcaaggggggagaaaacctgtattttcagggaagccatcaccatcatcatcactga

SEQ ID NO: 1129 - DNA, 2361 bp, Artificial Sequence
  6xHis UPI0001BC0C05
atggccgaaccgatttggattacccacccagcagcaccgtcagcaccgaccgttgtgcgttttgaacgggatctcacccttgcacgcaaacctggtcactttccggtccgtgttagtgcggacaatcgctttattcttctggtaaacggtcgtcgcgttggcgctggtcctgcaacgtctgaccttggacattggcgttacgcaaccctggatctggccccgtacttgacacgtggctcaaatcacctggaagccgtcgtttggaactatgtaaagccggaagaaccaatcccggatggcctttcaccagcccagaaaaacgcggctgcatttcgtaatcaacgtaatcagacgggtccggtagcacaaatatcagcccgtcttggattctggttttcggcaccgggagcacctgaattggatagcggcccgacgtggagagtccagctagactccgcccgcagcgctgcccctgtcatggggcaagttgccggtttttatgccgccgggccgtccgaaatcgttgatgcgcgtgttccgctggcggcaccagtagcggccacacctgctctcgccccgggtgaaccaagcccctgggccttatcggctgatccgctgccgcaaatgagttatcgcgcggtggatccgggccttgtagcccgtacgaatctggacgaagccaaggcgtttccgcgccagccagttacaatccctgcgcgtaaaaccgtcaaaattctactcgcgcgcccggccatggtagccgcatatccgacactccgcgtaacgggcggcaaagacgccagcatcaaactgacgtacgctgaagcgttaattgatgctaaaggacgcaaagggcttcgttccgaggtaggcgatcgtacaatccgcggcctgtcagaccgttttaccgctgatgggggagcccgtgcctttgccccgctgtggtggcgaacatggcgctaccttgagattgaagtacagaccgccgatcagccgctccgccttcagggtctggatgtggctgagaccgattacccgtttggtcaggtaggaaaatttgtgagcgacgatccggaactaaatcgaatttgggatattggatggcgcacggcccgtatcgatgctcatgagacttacatggacaccgcatattatgaacaattgcaatacgttggagatactcgtttgcaggcgcttatttcatacgcagtaagtggtgacccacgtttagcgactcaggcgatggatgcgttcggcgcctcacgcgccctgggcggcgtgacagaaggcgcatacccatctcgcaccagcaatccgatccctccgtttagcttactttggatcggaatgctgcatgattactggagccgtcaccccgatcctgaacctgcacgtcgtcatctggcccgtgcacgtgaagtcttggcatggttcgacggttatttaggccctgatggcctgatgcgcaaaaccccgggatggagcttcgtggattgggcggtgaaagatggtcgcttgttaagccgtgacgcttttccctcatacgatgcgcagggccgcagttgcttactgtcattggcctatctgggcgcgctgcgtgatatgaccgatctggaagcggcccttggcgaaccgtctctggcaggccgtgatcgcagccgcgccgaagccattgccgcagcagtgcgtgatcagtgttgggctcctgaccgtggactattcgccgacaccccggataaagcttctttcagtcaacataccaacgcactggcagtgctctatgatgtcgcagcgccgaaagatgcggcggcgattcttgatcgtactgttggccaagcaggtattgacgcccccactggtatgatttctacttcttattactacgcgtggtacctggttcgtgcatttgatcatgccgggcaagccgaccgttatctgtccctactggatacctggcgaggactgctggccctagactacacaacgtggcccgaagagcgcggcaacactcgcagcgatacgcatgcatggagcgctcatccgacggccgatttattggaactcgttgcgggaatccgtccggatgcgccaggctatggtcgtcttcgagttgaaccacatctgggggcactgagacgcctggatgcagcagcagccaccccccagggcccggttgaggtcaaatatcggcgcaaaggtcagcgattagtagtcgaagtgcgtaagccggccggactgtccggcgtgttcgtgtggcgtggccagagtcatgccctgttaggcgcacgtacacgcctcgatctgccggcgggtgacgaaaacttatattttcagggcagccaccatcaccaccaccattga

SEQ ID NO: 1130 - DNA, 1275 bp, Artificial Sequence
  6xHis UPI0001969377
atgctcgtagaagtcggcaacggctacagccaaacatcagtgaacacgacggtttttcgtaacaacagcctggttacccagggcgatgaacagtatattagctattacgacggcgatggctacctggttctgggcaaacgtaagctggatagcgaccaatggaccctgaaacgcacacagtacaagggcaacgttaaagacgcgcacaatattattagcatgatgcttgacggggaagggtacctccacctgagtttcgatcatcatggccacaagttaaactattgtcgcagcaccgcgccgtatacccttgaactgggagataaagaaccgatgaccggcgtagacgaagggaatgtaacctatcctgaattttatccgctgaatggcggcgatctgttattcgtttatcgctctgggtctagcggtcgcggcaacctcgtgatgaatcactattcggtgaaagagaagaaatggaaccgcgtgcaggacgtgcttattgacggtgaagaccagcgtaatgcatattggcaactgtatgttgacgagcagggcacaatccacttgagctgggtttggcgagagacttggcacgttgaaaccaatcacgacttatgttacgcccgctcctatgataatggcgtgacctggtataaggccaacggaaaaaaatacgatctgccgattcgctacaacaacgccgagtatgcctgccgtattcctcaaaacagcgagcttattaaccaaaccagcatgtcggcagacgcaagtggtaacccctacattgccacttactggcgtgatccagacagtgaagtgccgcagtaccgcatcgtatggcatgatggccaaatgtggcataatcgtcaggttagcaaccgtcatactccgttctcgctgaaaggcggcggcactaaaatgattcccattgctcgcccgcgtattgtggtggacggcggggaaattttctatatttttcgcgatgaggagcgtggttcacgtgtgagtttagctcatgcagcggcggtgggtgttggtaaatggacctttaccgatttgaccaactttccggtggacgcatgggaacccagtcatgataccgaactgtggaaacagaaacgtcggctgcatctcttcgtacagcacactaaacaaggagatggcgaacgccgtgtagaatttgccccgcaacctgtgtatgtgttggaggtggttaaaccgaagggcgacgaaaatctgtatttccagggctctcatcatcaccaccatcactga

SEQ ID NO: 1131 - DNA, 2712 bp, Artificial Sequence
  6xHis UPI0001B17C60
atgcaggtgacgctgcagaatctgcgctgtgaaatgctgcaaaacccgctgggcattgatgtggcgcgtcctcgcctgtcttggcagattgcttcgacacgcaacgatgttcagcagaccgcgtatcatattttagttgcttcgagcctggctaagctgaccgagaatgatgcggacatttggaactcagggaaggtcaactcagcggaaagcctgtacaacctgtacgccggccagaccctgaagagcaaaaacaaatattattggaaagttaaggtttataccagcaaaggtgagtcctcctggtcacagccggctttctggctcatgggactgctacactacaaggattgggagggccgctggatcggcttcgatcgcttctttacaggtgataacgaggccggcgcccgcctgagcgctcgctacttccgcaaagaattctccactaccaaaaccgtcgcgtcagcaacggcgtatcttatggggatgggcctgtatgaattgtacatcgacgggcagaaaattggagatcaagtgctggcccctactgctacggattataccaagaatatcaaatacaacaccctcgacgtcaccgaacagttgcgccaaggtggtaaccacgccatcggtgtaattctgggcaatggccgcttcttcgcaatgcgccagagcaaagcgtacaaagtcaaaacctttggcctcccgaagctgttgcttcaggttaacatcaaatatactgatggttctacggccactattaaaaccgatgacacgtggaagggaaccgctgacggcccgatcctggccaacaatgaatatgatggcgaaatctacgatgcccgtaaagaatttaaaggctggtcggaacctggcttcaaagaagacaagtggttacgcgccgaatacgtacaagaaccgggtggcacgtatgaagcacagttaaacgaaggcatgaaagtgatgaagacacttagcccggttagcattacgcgtcgccccaacggaaattatatcctggatttcggccagaacttcagcggatgggtaaaattcaatgtgaaaggtccgcgtggcaccagcgtgagtctgcgttttgccgaaagcctggaaccgaacggcgagctattccgaacgaatctgcgtgatgcgcgtgcaaccgacatctatacactgaaaggtgaaggcactgaaacctgggcgccacgctttacgtaccaggggtttcgctatgtcgaactgaatggctatccaggcgtgccccagaagtcggatttttcgggatgccttgtgtacgatgatatgaaaacagccggtaccttcgaatcaagcaatagcctgctaaaccagattttcaaaaacgcctggtggggtattgcgtcgaattataagggtatgcctgtcgattgcccgcaacgtaacgagcgtcaaccgtggttgggggatcgtaccgtgggcgcgtacggggaatcgtttctcttcgataacacggccctctacaaaaagtggcttgatgacatccgttacgcccaaaaagaggatggtgctatcccggacgtcgccccggcattttggcgctattatagcgataatgttacctggcccgctactctcttgtttgtagccgatatgctttatcgccaaaccggagactcgacggtgattcggaagaattatcccgccgtgaaaaaatggatgagctacatgaaagaccgttacatgagctcggaaggcattatgaccaaggattcctacggagattggtgtgcgccgccggcgacggctgaagatggcaaaggagtgaatgctgatcagaaacatccgtcggcgctgattgcgacggcatattattatcatctcgccaacatgatggccggttattcagctctgacgggtaacgcgggtgaccgggaaggctatacccgtctggcggcggaagtgaaaaatgcgtttaatcgcaaattttacaactcccagggctactatggcgacaataaactgaccgacaacctgctcccggtctatttcggtttggtggaagaagcagataaaggtcgtgtagtgatgcagatttgtagcatcatcgaggagaaaaacaacggtcatttgtctaccggtctaattggaacccagtttctaatgcgcacgttaacagaagcgggccgccctgatctggcgtatcgcattgcaagccaaaaaacgtatccgtcgtggggctatatgatagagaatggtgccacagctatttgggaattatggaacggtaacaccgctgcaccgaaaatgaatagccagaaccacgttatgatgctcggcgacctcatgatttggtactacgagaatctggcgggaataaaagcggccgcaccgggctttaaagagatcaccatgaaaccagaactgattgaaggattgaataacgtcaccgcggggtatcaaagcgtttatgggctgattaaatcgtcttggacaaagaccggaaaaaagttttcctggaacatttccatccccccgaatacccgtgctaaagcctacttaccggcaagcatgcagtctcaagtgaagaaaggagcgactgcggatggcgcgaaatatattatggcggaaaatggacgcgtggtgtttgaattaaaatcaggcgagtatgcgttcgttgtggagcaggaaaatctatactttcagggcagtcatcatcatcatcaccactga

SEQ ID NO: 1132 - DNA, 2751 bp, Artificial Sequence
  6xHis UPI000571C0C2
atgtgcgaaaattcttcagtcctacaagaggctaaacacctgactattagcgagggctttaaaaatccgttaggcttctatgatgcgaaaccaaccttttcatgggagttaccggtggtcgaaggtgtgatttctcagtccgcctatcaaattgtggtagcgagctctccagatttacttcctaacaaccccgatctttgggactccaataaacagagcagttctcaatcggtttggattaactacgagggcaagcctctggttagtcgtcagaaagttttctggcaggtgaaatattggaaccaggacgacaaagcgtctaactggagccctgtacagaactttgaattaggcctgttgaacaattcggattggaaagcgaagtggattggcctgccgaccaaagaggaaggcgtgctgggcagccaagataatataatccatcgaccgcaatatctgcgtaaagtgttcgaactgtcaaacgatgtcgccaatgcccgcctgtatatcacagcgaaaggcgtctttgacgtggctattaatggcgaagacgttagcgacgacgtgatgccgccgggctataccccgtataaaaagcgcattgagaccattacctatgacgttacagatttaatcgaaagcggccagaataccattggcgtggaagttgcagcagggtggcacagcggacgtctcggctggatgaagtcctattggagcgatacggaatccccgaagattctctgccagttagaagtgaccatgaaagacggctcaaaagctagcatcattagtgatgatacctggaaggcgactacccagggcccgattaggatcagcgaaatttacgacggtgaaacttacgacgcccatttggagatgccacactggaccacaaactcgttcgacgacaagaactggaaagcagtgcaggcctttccggtgacaagcacgattaagctagaacccaaacgccataccacagttaaaagtaaaattgtgctggaaagtaaagaaattattctgaaagccgatgccgcaatcttcgatttacagcagaacatggtaggtgttcccctgctgaaagtgccgatgaagatgggcgacacactgaagatcaggttcgcggaaatgctgagtcccgatggcaccttctacaccgataactaccgttccgcgcaaagcactgattactatatcgcggcgaaagaaggtactatcgaatggatgccgaaattcaccttccacggcttccgttatgttgagcttagtggattcgatgccagcaagaccccgtcgaaaaactgggtgaaaggagtggttcaatacagcaatttcaatgaaaacggctcgttcacgagctcgcatgaaaaactcaaccaacttcaatcaaacatcgtgtggggtttacgcggcaactttttcgatatcccgaccgattgcccgcagcgagatgaacgtatgggctggaccggtgatgcgcaggttttcggccctacaagtatgttcaacgcggatgtgtacaagttttgggcgagctggatgcaatcagtccgagagtcgcaatatgataatggcgggattccatttgttgttccggatgtcctgcacaacggtaaagtttcgagcggttggggggatgtttgtaccatcatcccgtggaaaatttattatcgcaccggcgatgtgggcatccttgaagaaaattacgatatgatgaaaaagtgggtggcgcaccatcaggccacctccaaagactttatttcgcatatgaactccttcgcagattggctgcaaccgtatccggaaaacggtaataataagggcgatacctcgcattccctgatcggcacggcctttttcgcccatagcgccaaactgacggccaaaacagccgaagtgctgggcaaaaaggaggaacaggcgacctatgaggcgctgtacaaaagcgtggcgaaagcgtttgagaacgcatttttcaaaaacggcaaagtgaaagacgtaacggcaacgcagacctcgtacttactggcgctggctttcgacctgctgtcggaggaaaacaaagaaaacgcaaaacagcagttgttagagaagataagtgaagcggataaccatcttcgcacgggcttcctgggcactccacttctgtctgaagtattagacgaaaccggtgagattgatcttatgtataaactgttgtttaacgagacctaccctagctggttttatagcattaaccagggtgctactaccatttgggaacgctggaatagctatagcaaagcagaagggtttaacccgatgaaaatgaacagcctcaaccactacgcgtacggagcgattggtgagtggatgtacgaacggattacgggaattgcccctctgcaggcaggttataaaattatttcgatcgcgccgatccctaaagcgccgttaaccagtgctagtgcaaccctgaacactccttatggggaagtggcgtcatcttgggaaattaagaatgaaacgctctttctcgaggtggtggtgcccccgaatacaaccgccgagattgagattccgacagataacagtgaatctctcaaagtggacaatgagaatttcaccaatggaaaaaatctgaaactgattaaaaacgagaaaagaaaaattaaaattctggcgcagccgggcacgtacgaattccaggcgaaatactcactggaaaacctgtacttccagggcagtcatcatcaccatcaccactga

SEQ ID NO: 1133 - DNA, 2832 bp, Artificial Sequence
  6xHis UPI00004C6D41
atgaaaatcaccaacattttagtcaaccagatggaacatccgctggggtttgacctcagcaacctgcgtattaccttcgaacttacggaaatggaaaacatcattggcaacgtttataaaaacattagtgttggaaaagtagagtcggaacagccgatttatttcgaacccgacgaactgtatgaaaacaacgccttcaaaatcaacatggaacttgaaccgcgtaccaaatactgggttaaaattggagtccgcaatgataacgaagtaacctcttcgaatacctggtttgaaacgggcaagatggatgaaaagttttacggcaaatggattaccaacaagaaagacgttgagaatactctgttcaaaaaagactttgaattggctaacaaacagatcaagtctgcacgtctgtatagcaccaccttaggtgtgtacgaggttgatcttaacggagtgaaggtgggcaacgaattcttagcgccgggtttcacaaactacgacaaaattgtgcaactgcagacgtacgatgtaactaagctggtgacgaaaaactcaaataatgagctggtgttcagcgtgggcgatgggtggtacaaaggtaatttaggttttgacggcggtcagactaacatctacggcgataaaaagagcatccttgccgaactacatgtcacgtacaccgataacagcgaacaggttattagcaccgatagctcgtggctcaccaccgaagggaaaatcatcaagagctccatatactatggggaggatatcgacgataccaaggatattctggattggtccagcgtggtaattctcaataaaagcacgagcattgttcgggatcgtctgagcctgccgattatgaaaaaagaagttctgaaagttaaagaaataattcacaccccgaaaaatgaaatcgtgttagacttcggtcagaaccacgcgggctggccggtctttattaatcgcctggcgcgaggcaaaaaaattacattgcagatgggtgagatcctgcaagacgggaatttctataataaaaacctgcgcttggcgcgtgccgcgttcacgtatattagcgacggcgaagaaaaactgatccgtccgcacttcacctactttggcttccgttatgtcaaaatttcgggagtcaccgatgtcaataaggacgactttgagagctgggttctctacagcgacctaaaacagaccggctttatcaaaaccaacaacgataaggtcaatcgcttatttaagaatgtcatctggggccagaaatccaactttatggacgtcccgacggactgcccccagcgcgatgaacgcctgggctggaccggggatgcggaaattttcgcgccaaccgccagctttaatatgaacacttatgagttctacaaaaaatatgcaaaagatatgcttgtagaacaggaagataacaagggaatgcttcccattattgtgccgtctctcaagcaaaaatcgaccggaatggcgatctggagcgatgccgcgacgatcattccttgggtgacctatcgctttttcgatgatttaggggtgctgaaacagaactatagccagatgaagaactgggtggactggattacccagaatacgaaaaccaaatatctgtggatcggccagatgcagctgggcgattggctgtcattggataatggcgccaatccgcagggaaagacaaacgaagattatattgcgtccatttattattttgtcagcgcctctattgtgagcaaagcggcccgcctgctgcactatgacatggaaagcgattattacgagaatctggcgcgcaacatcaaaacgaacatcttgaacgaatttgtgaccgaaaaaggtcggatagccatcgatacacaaaccgccctggttcttgcactccacttcggcctggtgcatgattatcagaaaagccaggtggttgcggatctggtgaagaaggtgaaagatgataataagcatctgcagactggctttgtgggtactccgttcctgctcagcgttctgagcaataacaaccagcatcacttggcgatggatatttttatgcaagaggattgtccgtcatggctctatgaagttaacatgggagcgacgacaatttgggaacgctggaattcagtattaccggacgggaaaatgaatccggaaggcatgaacagcctaaaccactactccttcggcgcggtcatgatgtggatgtaccagtgtgttgtcggcttaaaccaattcgatgcgggctttaaagaaatttattttgctccgaaattcgattgtcgcctgaaagacatctactcggaattcgacagcacatatggcaagattaaggtcgaatatcatctagaaaccaacgagaagcacctgattcgcatgaatttagttatccctttcggggttaagatgaaagtaaagctgccacgctctgcgaagtatctgattaacggcaaagaaaagatcggcattgtaaaactggagtatggcaaatacgatatttcctacattccgactaaatcgtaccttaattattatgacctgaatagcaaactggtagacatactggataataacgatttggttaaacgcattgatcagatcgatgagaagatcctccagaaagtcaaacgcatggggaacacccggagcattttcatcaacaaaaaaattgacgagctcctggacttcgaagaaatcagtcaggaggaaaaaaatcaattggtggatatcctgcacaaaaccatttttatcaaactgaatctgttcgaaaacctgtatttccaaggcagtcaccaccatcaccatcattga

SEQ ID NO: 1134 - DNA, 3582 bp, Artificial Sequence
  6xHis UPI00001AC07D
atgaacgaggacgggtggcaagatcgccgccaactgccgcgtttttcctggattcgcctggcgaaaggccgcagcgcggaattatcgagtatcccggttaggccgctcaaaatgctgctatcgatcctgtttttaaccgttattaccgttgcagcaagttcttctgtttcggcgctggaaccgcagcgtctgcgttgtgaatacctggaaaatccaaccggaattgatgcagcccgtacgcgcttaagttggcaggttacttcagaccaacgaggacagtcgcagattgcctatcgtctgctggtggcgtcgagcgaagagcaattaggctcgggcgtcggtgacctttgggacagtggcaaggttaaaagcgaccaaacgctgtttgttgaatacgcagggaaaccgttatcgtcccgacaggaatgtttttggaaagtccaagtgtgggatggggcaggaaacgctaccgaatcagaggtagcgtcctggtcaatgggtctgttagatcaaagtgattggtcggccgagtatattagctaccgggatgacagtccgattcataccgacttaagtacgctccacttgccggcagctcgtcagtaccgcaaagagttcagcgcgtcgaagtcgatcaaacgtgccacggtttatgcaaccgcgctgggtatttatgaactgcatctgaacggtcagcgggtcggagatgcctcgttcgcgcctgggtggaccgactatcgcaaacgcgcatactacaatacctatgacgttacgaatctggttcgcgagggcgacaacgcaattggggcatgggtggcggatggttggtactcaggctacgttggttttggtttactaaccggcatgggcccggagaaaaatgggcgctccacctacggcaaaactccgagcttcatgagtcagctggaaattgaattcgaagatggcaccaagcagacgatcggcactgataccacttggaaggtgactggggaaggtccgattcaggaggccgatctgctgatgggggaaagctatgacgcacgccgcgaaatggtgggctggagcgagccgggttttgatcacgaccactgggatgatgctattctggcgaaacaaaacggccaggttacggcggcattctacgagttccgcaaccctacaactaccggcgcgggtgtgaaaaaagtgggtgagcaacgcgattttggctttaagcgcccggaactggaagctttcccgggtgtcccggtgcgggttacccaggaaattccggcgaaaaccgtgtcgaaactggaaccgggtacctttgtgtttgatttaggccagaactttgcgggtacgattcgtctgaaaattaagggtcgtgaaggggaacgaattcagctgcgctacggtgagatgttacatcccgatggccgcttaatgacggaaaatctgcgcaaggcgcgcgcaacggactactatacgtgcaaaggtaaccccgacggggaattctatcagccccgctttacttttcacggctttcagtttgttgaagtcaaacgtctttccgactctagcgaagatgcgggtaaagccaccgatagccagaatgtgcagacccctcctttagatatggtcacggggttagtgttgcattctgacacgccaatggcgtcgaccttcgaatgttcagatccgatggttaatcagctatttaagaacgtgctgtggacccagcgtgcaaatttcttagatctgccgaccgattgcccacaacgcgacgaacgtatgggttggaccggtgacgcgcaagcctatgttgcgaccgccgcttataacgcggacattggggccttttataccaaatggctgcgtgagctgatggaatcgcagcgcccttcaggtgccttcccgggctatgcgccgtatccgttccagcatggttgggattttggtaccgcttgggccgatgccggtgttatctgcccgtggacgatatggcagttttatggcgacacccgcgtcattgatgattgctgggaaccgatgactcgcttcatgcgatggcgtaagcaaacttccgtgaacgatctgggcgtttcgcatggaaacgcatggggtgattggctctctcagggggaagaaactccgttagattacattgatacggtgtactttgccatcagtgcgcgtatgatggcagaaatggccgaagccacaggccgcgatgaagaggcgaagttgtatcgggagcagcgcgccgcgacccaagctgcgtttcaggccaaatatctcaatgaagatggatcgatcaccgtgcgtacccagactgcacaagcccttgccctttttgctgatttagtgccggcggaacaacgtgaagcgactgggaagtatttagccaaacgcctgagcgaaaacggaaatcatatggctacaggctttctgggcacccgcccgctattgccggtgctatcaggtagcgggcagcatgatctagctactttcttgttacaatcacgcgaattcccgagttggggctatgaaattagcaacggcgctacgaccatctgggagcgctgggattcgtacaccaaagaggacgcatttggacgccataatgcagctatgaacagcttctcgcattacgcattcggggcggtgtgcgaatggatgtttgcgactttagcgggtatccagagcgatggcccgggcttcaaaaggattgttatccgcccgactccgcctagtccgggttcgaacgccatgcacgaacctattaactgggttaaagcctcgtatgaaagcatccgggggaccattcgctccgaatggaaaatggtggacggacgctttcatctgaatgtgacgattccagcaaacaccaccgcaaccgtatacctgcctaccaacgacgctaacagcattacagagagcggcaacgcactggccgatacggctaacgtgtccctgctgcgtaaagaaactaatgtggtcgccctgacggtacactcgggtagctacgaattcttagccagttcaggcatcgttcccgcgaaagtctcgctaaagagctcagaacctaaagataactccattaacccgggggagatcgatttaaccgatgctactaagcttgaatcttgggactttcgtaatcctcaggatctagccaaatggggagaacgcaagagcgtggatattgagcagcgtaacggtagtgcctatttggtggcaaccggggatgatagtcaaatggcggtacgtatgaccaaaccgctggaaggcaaactggtgattgaactacgcgcgagtccgtctcagaattccacatcacagttttattgggcgattcctggccgcggtttcaatggccaacaacaaacgaagcgtttgttacgtcagtcggatgcggtgaatgcgtatctcttcgcgattcccgatgcattaactgtgggtaaactgcgctttgacccttttgccacctacgatgagtatgccaatgcaggcgagatgatgatcgaaagcattagcatttatcgcctggtggatgaaaatctgtatttccagggcagccaccaccaccatcaccattga

SEQ ID NO: 1135 - DNA, 2631 bp, Artificial Sequence
  6xHis UPI0001BF9A6C
atgcgcgccatccgtctgcgcaccgagtatctgactgagccgctgggacttggaatcaccgcgccgcgtctgtattggaacgcggacggcggcctgcgtcaaacggcgtatcaagtcgtagcacgccgtggaggtgaaacagtttgggatacaggtaaagtggcctcatcgagaatgacgcacgttcgctatgagggcgttcccctgggaagtcgtgatcgtgtggattggagcgttgtgttatgggacgaggccggggcggccggccccccggccgagtcgtggtttgaactaggcttgctggatccggcggattggacggccgaatggatcactggtgattatacgccggaacctgatgtgcgttatccggtagatcactttcgccgcgacttccgtgtgcgcgaacctgtcctggcggcccggctgtatattactgccgcgggtgtgtatgaagccgtgcttaacggagagccggttagtgaggcccgccttggtccaggcgcgacggattaccgtcatcgtttgcattatcagacatttgatgtgaccagcctattagccgcagataacgtgctggaagtgcgcttagcggatggttggtataggggcagcctgggtgcatttggcgccacccatgtttttggccgcgaaacacgcttactggctcagctggaattaacctatcccgacggttcgacggagactgttggttcagatgaacgtttccgctggagtgatgatggccctgtgcgtttcgccgacctgcaggatggggaagtctacgatgcccgcctcgctccatcgtattcgggtcatgcgcgtattaccaccgaaaccatgatccccacggcagccgataatgtcccggttacggaacacgaaagatttccagctcgtctgttaacgacccctagcggtgcacgcgtcctggatttcgggcagaatttagccggtttcgttgcctttacggtgtccggtcgcgcgggtcagcgtctgacgctgcgtctgggtgagattctcgacggcgcgggcgaatttacccagcgtaattttcaattgcgcaaacccgtgcatgaatttggtcgcgatgtagaaatcctgctcctgaccggccaggagagcgagattaagggcgaattgcaaccaacgccgaagcaagaagttgtcttcaccgccagcggtggaacggatcattacgtgactcgcttcgcggtattcggctttcgttacgccctggttgagactgatttagatattgatcctgctgatttcgaagcaatcgcggtgtatagcgcaatggagcagactggcacttgtgtcactagccacgaaggggttaatcggttcctggagaacacgcgctggagcatgaagggcaattttttagacgtaccgaccgattgcccgacccgagaacgcttaggctggaccggggatgcccaggtctttttcgataccgccgcctacctgatggacgtaggcgcgttttttcgcaaatggctgcgcgatgtccgcgacggacagctggccgatggtaagctttcagcagttatcccctataacggcacatcgatgctatacgataccactggcggcagcgttggatgggcggatgcggtggtcctcattccgtatcgctattggaagcgttatggcgatgagtcgattctgcgtgattgttatgatgctatgcggcgttatgccatgtttatgatcacgaatgccggaccgttagatcccgaggcagcagctgacaacccgcatgcccgctatctgtacgagaaaggtgtacatctgggcgattggcttgaagctgccgaattccgtgatccttctcccggccgtactcctatgccggaagaagcgacagcatacttgcattacactatgacccacctggcggaaatcgctacagttctgggcgagacggcggacgccgatttattcgcggagtacgcccagggcgcaaaagcggcctatacacatcagttcctgcgtgatggcactctggataccgatcgtcaagctaaactggttcgtcctctggcactgggcttggcagatggtgacgtgaaacgtaggttggaggatcgattagtacaggcggttaagaatcgcgactttcatgttaacacgggcttcctgagcacgccattcgttcttccgaccctgactgcagcgggccacccagagattgcctatcgcatgctggataatgaggatgctccctcgtggctggctgaagttaaagcgggcgcgacgaccgtttgggaagactgggaaggcaaagaatctcgcaatcattacagtccgggtgcggtgtgtcagtggttattcgacactgtggccggtctgcgtgtaacaggcgaaaaccattttaccattgcccctgttcccggaggcagtctgacaagcgcgcaggcccgttatacgagtgtgtatggtactgttgcatcatcatggacgcgcacgggcaccgatttacacttgactgtgaccttgccgccgaacaccacggctgatgtacggctgcctaatgggacggagcacgtggtgggcccgggtacccatgaatacacagccgaaaatctgtactttcagggctctcaccaccatcaccatcattga

SEQ ID NO: 1136 - DNA, 2685 bp, Artificial Sequence
  6xHis UPI0001B7FF91
atgaatccgacagcgccagccgaacagaccccgacagatatcacggtgtcagtgacaggactgagaaccgctgacgattcgggcctggtggcgaccgcacacgcgatgccgcgtttatcgtggtcactgaccggaacccgcccgggaatactgcagcatgcttacgagatccaggttagtggggcaccatccttcgatgacaccacctctagtggtcaggtcgaaagtggaaccgttacagaccatccgtggccggctcagccgctcagttcgagagaaacgcgtcattggcgtgttcgtgttcgaacggatcgtgggtggacgcgttggagcgacccggcccgtgttgagggggcactcttggatgccgtcgactgggccgcgcgcccggtgcatgttccgagcgatcgaggaagaccaagtcccggccctgtgccgctgctccgccgtgagtttcatctgccggctgaacctgtgtcagctcgcctatacgtgacctcgcttggtgtacatcgtaccaccctgaatggtcggccggtgagtgctgatctcctggaacccggctggacgtcatacccggaccgattgttatacgccacatatgatgtgacgggcctactgcgtccgggtccgaatgcactggccgcagccgtaggagacggctggtttcgtggccacctgacatggcataaaaaccgtgatgtgtacggtgataccactggccttctcgcacaactggaagtggatctgactgatggtacacgcgttaccgtgattacagatggccggtggaagggcggctacggagacctgctgtccgccgatctttacgatggctgcgaacgcgatcttcgtgccgaaccgcatggctggcaattaccaggctttgcggatgatggttgggagccggttgcagtcttaccgttacctgaaggcctgggacagcgagcacatccaccagtgcgcgttgttcgcaccgtccgtccccgtttgcgtacattggcggatggcactatcgcggtggatgctggtgaaaatgtaacggggcgcttgcgcattcgtgcggatgggcggcctggaggcacggttaccgtacgccacgcggaggttttggacggagatggtcgtctcctgacctcgatacttcgtggcgcgcgtgcaaccgatcgctataccctggcagaaggcccggcggatttgacccctgagtttactttccatgggtttcgctatgcagaaatcgatgcgtccccggacgtttcggtggaggctgtagaagtcgaggttgtggcgggtgacctacgtcgtatcggcgaattccattgttcggatgaaagagtgaataccctgtatgccaatgtggttcgcagtcagcgtggcaattttctggcagtgcccactgattgccctcagcgcgatgaacgcctcggttggacaggcgacattatggcctttgcccctacagcatgtgccacgtttgatagcgcctccttcctagacagccggttgacagatttacgaattcagcagcgtccggatggggcggtgcctatggtagtccccgatgtgcctctgggcgaactgcctccggcggaacttccgtttgctggcgcggccgctggctggggcgacgcggcaaccgttgttccagctgcgctattcgaagcgtatggtcagcctcatttattagaacggcattataccgcgatgcgtgcatgggtagagtttaccgttgcccaccttgatgaagatggcacgtggtctggcaatgcccagcttggcgattggctggatccggcggctccccctgagaatccggccgcagcgactaccgatagcggctatgtggctacagcgttcgtggctcatagcgcacgcttattagcggatgcggcgcgcgaattggggtttcccgaagatgccgatcgttacaccgcactgcatcgccgaactgctgaggcggcatggcgcaaatggggtgatcacgcgcgcacgacccaaacgggctgcgctctggccctggaatttggcattgcgccggcgggtgaacgtgcggaagtcggcaaagcattggccagtctcgttcgtgcgaacggaggtcgtattgcgaccggtttcttaggtacgcctttcgttttaccggcactaggcgacaccggtcatgttgcagaagcttatgaactcctgctcaacccggaatgcccgggatggctgcaccaagtgagtcgcggcgcaaccaccatgtgggaacgctgggatgctattggccccgatggtactgtagatgtagaaaatgctggcacgatgctgagctttaatcactacgcgtatggtgccgtggcatcttggctgtaccgttcagtggccggactgcgcccagcaagcccgggatatcgcacactggatatcgccccgcgtccaggagcaaccctcacatctgcggaagccgctgtagatacgccgtatgggacagctagcgttgcttggtcaattggcgacggatcgcttactgtaagagcagtgcttcctccgggtactactggccgttttagcgctccagaaggctggacatgcactgaaccagttgacgcgctggcctcaggcagccacgttctgagcctgcgcccgttaacgcgccccgaaaatctttattttcaaggttcacatcaccaccaccaccactga

SEQ ID NO: 1137 - DNA, 2838 bp, Artificial Sequence
  6xHis UPI00006E5F74
atgaagctgtcactaaagaccttcttctatacgatgcttctgttttcgttctttcatgcgttctcgcaagagaagctggtaagtccgtggccagagagctcgaacattaatcagccctgggcacgttggtggtggatggggagcgcggttgacaagccgaatttaaaacgcagcttgattgactttcacaaagcggggattggcggcgttgaaatcaccccaatttacggtgtcaaaggtgaggagaacaacttcatcgattatttatcgccgaaatggatggaaatgttggattatacgattcatgtatcagatagcctcaagatgcaggttgatatggtcctagggaccggttggccatacggtggtagccatgttaccctgccgcatgccgcaaccaaactgattgttgagaaatacacggtaaaaaaaaatgaaaccttcgaccgcgatattacggttgattccagcaaggaaaaaaccccggcctcgctgctgtatgttgtggcctatgggaacgacggctcttttgttaatcttaccaacgagctccaaaacaaaaaagtgaacgttaaagacaaaggtctagaagggagtaatattaagttgcccaacaaactggagccgaacaaactgaattggaaagcgaagaaagccgactacaccatttacgcagtgttcagtggcaaaacgggtcagcaagtgaaacgtgcggccccgggcggcaaagggtatacactggatcactatagcgaagaagccttaaaagcctatgtcatcccgtttaatgaggccctgaaaggacgtgaaggcaaaattcgtgcggttttcaacgatagctttgaggtgtatggaaccgatttcaccccgaacttcttcgaggaattccagaaactgcgcggctatgacctcaaaaaacagctgccagttctgctgaacgagaccgataacgaaattggcaatcgcatccgttctgattatcgtcagacgatctcggacctgttgttaaacaagtttgataaattctggacaaattgggcccactcaaagaattttaagacaaaactccaggcacatggcagcccgggaaacctgattgatctgtatgcgtcggccgacatccctgaatgcgaaacctttggaagcatgccatttgacatcccgggatttcgccgtgataaagaagatattcgggaaggagatgcggatccggtcatgctgaaattttcgtcttccgccgcgcacatatcagggaagaacttagtcagttccgagacttttacctggctccgcgaacacttcaaaaccgccctgagtcaatgcaaaccagaagccgaggacctgatgctgaatggtgtcaaccatatttttctgcacggtagtacgtatagcccggatcgcgcagtatggcctggttggcagttctacgcaagcgtcaatttcaatagcaataatacgatttgggaggacgcgccagcactgttctcgtacattagcaattgtcagagccttctgcaacaagggaagccggataatgaaattctgctctactggccgattttcgatgcgtgggataaatatgagaaaggaacgctgttttatcagttcaaaattcacagcctttcggattggctgtacggcaccagtttctacgataccacgaagaacctgatgaaaaagggctacagtgtggacttcatcagcgacaactttattgcggaggccaaagtggtgaacgggaacattgtactccctggcggaaatttcaaaagcctcgtgattccttcgtgcaagaaaatgccggtcgaaaccctccaaaaactgatagaactgaagaaagcgggtgcgtgcatcctgttcgagggtctgcccgaaagtgtcccaggttttaaagattacaagaagcaggaacagaacctaaaaaacctcttggccgagaacaaaatacaagcagtgtcaaatatcttcacgtcgcttgaagatgcgaagatcctcccggagagcttagtgaacaccggcctgaaaagcattcgtcgtgacatcaatggcgagaagatctactacctggtgaatcacaccgcgaaaacgattgatgactttattccgttacaagtggagaataaagaaatcatcctactagaccctctgactcacgaatcggggaatgccattgtgaataaaaaggataaaattacttatgtaaaaattaagattgaaccgggccagagttactttctgaagaccgagaacacagcttcgcagaagaaatggaactatttcgaaagtgcctcggaaccgattgctctcaaaggcaactggaagctcagcttcgataaaggcggcccgaaattaccggcggatgccgtcgtctcaaatctggaaagttggacaaaattaagtcccgatgcggaagcatttagtggatcagcggcatacaccctgcagttcgagaatccgaatccaaaaattgaaaattggagcttaaacctcggcgacgtacgtgagagcgcgaaagtgtggcttaatgatgaatttattggcaccgcttggagtgtgccctacaagctgaacattcaaaagttgaaacccggcaaaaatgtccttaagattcaagtgacgaacctgccggctaaccgtattcgagacatggaattgaaaggccaggagtggaaaatcttccacgagattaatatggtcgacaaagactacaaaaaatttgacgcgaccaaatggattccgatgccatccggactccttggtcccgtgacattaaccgctctgaaacaggagaatgaaaatctctacttccagggtagtcatcaccaccatcaccactga

SEQ ID NO: 1138 - DNA, 2985 bp, Artificial Sequence
  6xHis UPI00034E666D
atggcagcgagccctgcggcttcaccagcagctagccccgctgcctcagcgtctgcaggcgctactccgactgcatcgtggtttgcagcgccggctcgtgcagttcgcccaaaattccgctggtggtggccagatggtttagttgatccagccgaaatcgcgcgcgagatagatcagatggccgacgcagggtttggtggagccgaaatagccgcggtgcaccatagcattagtgacaccagcgtcctcgataccgcccaccatggctggggctcggccccttggcgtgacggtgttaaagctgccctgcgccaggccgcgcgccgtggtctgacggtagatttaaccttaggcccgagttggccggtcgctgtgcccggcgttactcccgatgatgaagcagcggtgaaagagttggcctatggcaaagcgacccttaccggcggagcggcttttgatggcccggttccagccccggtctatgctccggcctcaggtgttacggttcagaagctgttcgctgtccaggctgcgcgggtagatacagcgtactcatcgggcaaagccacagggctcgacgttgattcagtgaccgatctcaccaaccgcgtcgcagatggtaacctacgttggacccctccagatagcggcacgtgggtagtacttagctattggcagcgcggtagtggccaacagccagaagcggggccacattcgagcccggctgcgtatgtcattgaccacttctcagcggcgggtacggccgcagtgacacgttactgggatacagccatcttagatagcacccttcgaaaactgctgaaggcggcgggcggggccttttttgaagatagtgttgaactagaatcgaaaggcttacagtggacaccgggtttaccagatgccttccgtgcgcacaccggccgcgatcttctgccgtacttgcctgcggtgattcttgataacagcaaccaggtgtttgcatttgaagcccgcttaacccaagagattcgtcacgatttttgggaaacggttagcaaccttttcaacgagcaccacctgggcgcgctcaaaaaatgggcgcacggtcatggaatgaaacttcgcagtcaaccgtacggcctccaaacagacgcgattgctagtgccgcagttctggatattcccgaaggcgaatcacttggttttaaaaatcttgacgattatcgctgtctggcgggaggacgggacatggccggctcacgtgttctgtcttgtgagtcaggcgcatatgcaggaggggcctacaatacgacgtgggataaatttctgcgcacaatgggtggtgcctacgctgcgggtgtcaaccaaaccgtgattcatggttttagctatgccactgccccaggagtatcctggcctgggttcgccgcgttctcaccgtattctggcgcgccgggctatggcgaaagctggggaccacgtcagcctacctggcatcatgtggcagacgttgcgggctacattggccgggtacagcaggtgctgcagtcaggcacagttcgtgctgatgtggcggtgtttcgccagaccggttatactgccaccggaataggggccagctggttaacttccaccggcgtgcccctgggctggacccaccaatttctgtcaggtccgttactcgacctgccgaacgctaaggtgtccggtaaacgtctggcccccgatggaccagcatacaaagccctatttcttgaaggggattttttttacggatccaccccgaccttatccgtggatgacgcacataaactcttgaagtttgctcgcgcgggtctgccgaccgtgctattaggtgcatttggccaggcactgaccccaggtctgcctgacgacggcgagacagatgaactgcgagcgctcaccgccgaacttttagcgcttccgaacgtgcgtaacgtaaccgataaaaccctggttggtgctgccttcgcggaactaggggtgacgagcgacgtctcatattccgtgtcgagcaccctgttaaatgcgcatcgtgtgaccgatgacgcggatttttattatctgtgcaatggcaagcacgcagaaaccgtcaaaccgcctgttgcggcgattgatcatgacgttaccctgcggtctactgtgcgtggcggcgcgggtaccgttccctacctgcttgatccctggtcaggacgcgtgacgcgcctagcgaggtacactcgcgatggagatgcgtttacgtttcgcgtgacgctgcagccaggcgaaaccttagttgtagcccttggccgccccggcctgtttggcaaccgtgatggcaatcgtcctcatgccgtagcaacggacgccgatgaagcattgttcacgggtggtcgccttgcggtgcgcgcatccgctgccggcacgtttactacgactctgagcactggtcgcaaagtgacgacaaaagtcgcggaagttcctgcagctgtgacgccggaccgctggaccctgtctgtcgacgattggcgaccaggtgccgatgcgacctcaacggaagtagtgcgacattcgttgactttagatgcattattgccatggtctcaaattcccgaattggcggacgtcggcggtattggcacctaccgtaccaccgtaaccttaccgaaatcctggagttcggccaccggcgcactgcttcgcttgggctcagttaccgacacctgtcgcgtcactgttaatggtgtgcgcctcgatccggtggatagagtgaacccggttgttgatctgggcggccgtcttcgcaagggggcgaacacattggaaattgaagtggccacgccactgtttaatcgtctgcgggtttcaaatccagcagtctttgggactgccgcaaggcaggcttatggcctagtgggcccggtgcaattagttccgtacgtccagcgtaccgttgcggaaaatctgtatttccagggttcacaccaccatcatcatcactga

SEQ ID NO: 1139 - DNA, 2736 bp, Artificial Sequence
  6xHis UPI000198DF25
atgctcgtaggtggtttagctactgctgccacggcacaaacaaacctgcaacagctggaaaaaacctttcagaatccgccagataacgcgaaacccatgttacgatggtggtggtttggcccatcagttaccaaaccggagattctccgtgagatgcagcagatcaaagcaggggggttcggtggtttcgtgatacattatgtgtatccgcttgccctggacgatccgcaaactggctttcgcaatttgcccttcctctcgcccgctatgttatcggatgtatcttatgcaaatcgccaggcccatgcactgggactacgcgccggcaccgcacttgcgtcgggatggccgtacggaggtccgatgaccgcagttacggaggccgccgcgaaaatcgtgcaaaaagaaagcactgtggctccgggtgcccactcagttgcgttgccgtcaatcggcaacggtcaaaaactactggccgtgttcgcgcaggacggcagtgcgggaagccagcagaaaatgttaccgctccctgccccggtgaccctaagaatggcaatcccgaccggcacacatatcgtagattggtatctgatgagtcgtacaggccaacaagttaaacgcgcagccgtggacgccaatggcttcgtcctggatcattttagtcaccacgcggtcgcagatcatttaaaaaacgttggagacaagctggttgcggcctttggtagcgaaccgccagactcggtttttagcgattcattggaagtgtttggtgcggattggaccccggatttcttagaagaattcagaaaaaaaaacggctatagcctgctcccgtatctgccggatctgtttatgaaacacccggatgcccaggccttagccgttcgtcatgactggggtgtaactttgaccgccctgattgatgagaattaccttactcaagtcaacgcctgggcccgcgcgcatcatactcatctgcgcgctcaagtttacggccctccggctgtttcattgagttcgaacaatctggtggatctccctgaaggcgaaggcccgcagtggcgtcaatttgcgtacacacgttgggcaacctcagcgggccatctgtatggccgcccaatcattagttccgagacattcacctggcttcactcgccagcgtttcgtgcaacccctttagatgttaaagcggaagccgatcgattcttcctgcaaggcgttaatcagatctattgccatgggtggccatatagcccgcccagcgccggcgaacctggatggcgcttctatgcggcggcagtattcgatgctcataacccttggtggattgtaatgccggaagtgacccagtacctgcagcgcgtttcatggatcatgcgccaaggcgcgcctgctaaccgcgttgcgatcttcctaccggaagatgatgcttgggcagcgttcaccccgggtcaggtagcattaactggccttttgccccgatggattacccctcagctgacccaggcgattgaaaactcaggttacgattttgattatattgatgcggccgcgattcaagcccgtggcatccactactcactgctgatcttacccaacgtagatcgtatcagccctgcggccttgactgcgattcagcaatacgaaaaaagcggcggtaaagtcattgcgttaggtcgtattccggcacatgcgccgggcttccttcactatgaacaaatttctgcggaggttaaccgcgaatcccacgctttcttcggtcacccgggagcgcgcgtgcgtgtagtgcaagcggtatcaggtctaggtgacgcactgcatcagatgctgacgccagccatgactctgagcgcggcgaaaccagccgtaggattcgtgcgtcgcaaactcgatgacgctgacatctattttctggcaaacacgtctaacgtgtctattcacacggtcgcacacctgcgtagccgatatactagcgggacttggttagatccgatgagcggaaaagcgtatgcggcacaaagccggaacggcggctggccattacacctagctccatacggcagcaccattttggttctacacgccaagaatgtgcgtctgccagtggcggccggccatgattcattcaatccgtccagcaccaaagcgatcgccgacttaagcagtgattggaacgttagcttcccggccttacatctgcaggaaccgatggcgaccctggctagctggaccaaaaatgagaaaacactctattattcaggcgtcgccgtgtatcgacgtacattagaagttgcacagaacgacctcgatcacgccccgttactcctgtcattcggccaaggtacaccggtgtcaccctcagcatttcatcgtcagatgggcactcgcgcgtggctgaatccaccggttcacgttgcagcagtcgtttacgtgaacggtcgtttggccggtaccgtgtggcacccgccttacgtattagccgtggggggcttattaaaacctggggccaatcagatagaagtccgtgttgcgaatacagccattaatgagatggcaggcaagtcgttgccggattacagactgctgtgggctcgctacggccggcgctttgaacctcaggatatgaaacatttacaaccgttgccaagtggcttgctgggcaaggtcgaattactggaaggcgagagtcgcgaaaacctatattttcagggcagccatcaccatcaccatcactga

SEQ ID NO: 1140 - DNA, 3402 bp, Artificial Sequence
  6xHis UPI0003ED82D3
atggagcaggatattgctcaacttcagaatgtggaagcggaaccgtccccagtcgaacaggaggcccagacgtctcttgccacaagctttaagcacccaccgcatgaggcgaagcctctcacgtggttacatgcgatgagcggtaatatgtctaaagcaggcttaaccaaagatctggaagccattgcggaagcaggtttaggaggcaccatgttgttcaacgtgacccagggcatcccgttaggcaaagtcaagttcaactcgacggaacatatcgacttgattggacacttagcagcggaaagccagcggctcggcctgtcatttggtatgcacaattgcgacggttggacaagcagcggtggcccgtgggtgaccccggagcactcgatgaagcagattacttacaacgaaaccatcgttgatggagggaacgtgaacattaaactagcccagccggcgacgatgcttgactattatcaggacatagcggtgatcgcgtacccgtcactggcaaccgaaattacggactttactgtcaaacctaaaatcaccgccagcgacgcgaacttcgatgctcagatcgtccaaaataataatctgaccgattactcaagtatcacccctagcaacgagcagccgggatggctgcagttttcatatcagcaaccgtacaccttacgcctgatagatatgctgttgcactcgggtcgcggtctgaatgtgtcattacatatctctgatgatgggaaaaattttaaacaggttgacaacctcacgttacgccgccccgggaagagcacctatgcctttgatgaggcgtttgcgggatacacggccaagcattttcgtctggtgtccaacaaggtaatgcacattaaagaactacgtctgtcgtcgacgccttctctggacaactttagtggtcgtactgcggcgtctcgttcggactaccaagagttcgaagatattggcaagccgagcgccgaattagtcattgacccggaaagcgtaatcaacttgactgcatcgctgaacagcgagggccaactgatcaccacgctcccggcgggcaagtggactatcatgcgttttggctatacctcaacaggtgcggtaaatattcctgcgagccgtgaaggaactggtcttgaggtcgataaatttagcaaagcagcctttaaaagccactatgatgcttacattacaaatgtgatcgataagttaaaggtcgtcgccccaaacgcgctgtattccatcgagattgacagctatgaagttggtgcccagaactggacccacaactacgaacaactgtttcaagcacagtttgggtatgatctggttccgtttctgccgttattcgcgggcaaatttgttgagtctccgaccgttgcggaggcagtactttgggatacccgcgatctaaacaacaaactgattaccgaaaactactatggctacttccgcgaactggcacaccaggatggcatcaaaacctatttagaaccatacggctccggaccgtttaatgaactggatgtggcgagcaaagccgatctgccgatgggcgaattttggctggataataataactttcgtctgtccgccagtgcgtctgcggcacatatctacaataagccaatcgtagcggccgaagccttcacccaattcccgcgcaataattggctgtttcacccggcggaaggtaaggcggattcggacaaaagctgggctctgggagttaaccagcatgtatttcatcgtttcgcgcatcaagctaatacccatgtaatgccaggaatgaccatgaatcgctggggggcgcatatggatcgtacacagacctggtggaccgtagccggcaaaccgtggtttaaatacgtagcacgcggtcaacaacttttacgcaccggccataatgttgcggatgtgctgtggtttctgggcgatgcaactccgaccacgtgtcccgaaaaagatcccatctccgcggtgctgcctctgaacatcaactatgattgcctgaacagtgaagtcctccagcgtctgtcagtggaagatggcaaagtaaccctgccccacggttcccagtataaaattctggttctgaataaccaccaaacccttaccctaaaaagcctaaagaaaatttaccagttggcacagcaaggggcggtaattgttggcacccccgtggaacaactcgcgggacgctttgtctctgagcagcaacgtcaagaattgaaaatgatggttgactacatctggtctcaacccaccacttataacatctccaccaaggcaaaaacctcgcatggccacacgggtgttttcccaacccacgagatcgccaaaacatcaaaaatcgattggcagaaaatctataacgaacaaaattggcctttggatctcgccattaaaaacgcggataaattctactttacccatcgccgctccgcccagtacgacatttattttatctttaatgattctgcacaggcacaggtgtttgacgcacgattcaatatttcgggtaagattccggaactatgggatgcggatacaggcaacatcacccagttaggtgccttcagtgataacggccagattacccgcgtcccgcttaaacttggagcctatgattcagtatttgttgtgtttgaaaaaagtagtaaggccgtgaccgcgctaaaaccggagtttgtcctatcgcagccagaactcgacgttgttttggatgcacagcagcagccgaaagtgattaaaaccactcatgaagcgattgaaatcactggtgcatggcaggtagaatttgataaattttacggtctggataaaagcttcacttttgaacagcttattgactggaaactgcatccggaacagaccattcaggattatagtggcaccgccacctaccaaaaaacgatcgatgtgccggccgaacttctggccgataataaacagatcttcctggatctgggaaaggttaaagtggcggccaatgtgtatttgaatgacaagctggccggctccgcgtggcatgctccgtaccgcattgatatttctaattttgtgcaggccggcaagaataaactgaccattaaggtggcgaatctttgggttaaccgtttacttgccgatcgtaaactgcctgatacatccggctttaaaatcgcgcgttggcaaaatcccattaccccgatgccccagtggtatgtagacaaccaaccagccccgaagagcgaacgcgtgacgtttgtgactcaagtgtttatggatgacaatgaacctcgacagtcctccggactaatcggcccggtccagcttagcgtgcgcagtaaaacgcaactggagaatctgtatttccagggttcgcaccatcatcaccaccattga

SEQ ID NO: 1141 - DNA, 2742 bp, Artificial Sequence
  6xHis UPI0001A461B7
atgagttctcataccgcacagcacgtactggatgcgttaacccacccggatcctgcggcgcgtcctatgatgcgctggtggtggtttggccctgacatggatcgtgcagaaattgatcgtgaattacgcgctatggcggcggccggtctgggcggagccgagatcgcattagtctacccgctgaggccgggcgctcctgattatctgggtgacgaagcactgggtcacgttcgtcatgcggccgagcgtgcccgtgaactgggcttgcgcctagatgtcaccttgggctctggatggagctatggtggcccgcatattggacctgaacaagctgcgcgtcgcctgcgctgggagaggcgcgatttaggtccgcaaccgctaagttggccgctgactccgagctggcccggcgatgaactggtcagcgtgcatctgggggaaggcttgcctccaagtgggtggacgcgtcttgatccggttggtgaacgtctggaaatccccgctggtcgcggtccgcgaaccgttttattagcttggtcggaagtaactggccagcaggtaaagcgtagcgcagcgggggcggaaggtccggttgttgatcacctgtcggcgacggcagtacgtcatcacctggacgtggttggcggggcgctgctgtcagcggtcccagcccatcttctaggtagtgttttctctgatagcctcgaggtatatgacgcaggttggacggctgctctcccggagcagttccgacagcgacgtggttatgacctattgccggtcctgcatctattagaggttgatgcgccaggagcggaacaggtccgtgaagactatggattgaccctgagtgaattggttgaagaaggtttcgtgggtacctgccgtgcttgggcagaggaacacggcgtgcgctttcgcctgcagggctacggacaacctcctattacattgtcggcgcagcgcggcgcgcacctgattgagggcgaaggagccggatggaccgcccttacgcaaagccgctgggcgagtagtgccgcacatttagatcgtcgtgaggtcgtaagctccgaagtgtggacttgggtgcgctccccggcctttcgcgctgccccgctcgatttactgggagaggcccacgaacatctgttgttaggaatcacacatttcgttgggcatgggtggccgtatactgccccggatgcacccggtttaggctggaccttctatgccgctggcgcactggacgatcgtaacgcgtggtggccggcgatgccggaactgaccgcccacctgactcgtttatgtgctgctctgcgcttaggcgccccgggagccgaagttgcactatatctgccttacgcggacgtgagggcagcacgaggtcggggtcatgatctgtgggctgcatgtagggcccatataggggaacagctgcccgcggccattcgtcgcgcgggttatgacctggatttactcgatgacgatgcactagcagcactggaccctgcagcatatccagttgtggtgcttcccagggtgtcgcgcctgccagccgaaactcgtcgttggctagatcgagtgcgtgctgcgggtggttctgttctggcggtggatagtccggcctaccccgccggtcaacagctgtcgcttccggaagaagatggcgatgacgctcgtttgcgcgatcacgccactttagcgatggttggcgctcgcggtggctcagacgccgaaggtgaggaaggagcggatggtgaaggcgccgatggcgaggcagcgggaggaaagaatccccttgcagcagccctgaggggtgcacataccccgccactgctgcttagtggagacggcggtgaagtgggtacagtacatcgtcgtctggcagatggcgacctgcatttgctagcccatactggtccacgtcgtcgcgaagtcgaagtgacccctcgcgatccacgtagagcactggcattacatgatccggcggaaccgggcctgcgcccgctaccgagtaccggagcgcgtctggttcttcacccttatcaagctgtcttgttactggccactgaccagcctcttccggcaccggacggggccgccccagcaaccgacgcggcgcacgggccggcacaaaccggcacagccgaaccggaaccgattgccttagacggcccctggactgcgagtaggccaggcgaagcgccgcgtgccgttacgctgcctcatttattgaccgggcaagacgcagcggacctacgccccttgctgctggaaacgaccgtaaccctggatgaagatactgcccgtggcccactggttcttgacctgggaccgggcagagcagtcccgcataccggcgaaggcagtggttaccgtgcgttgttggagcccccggtgcgtgagatcgcggttttagaagttgatggagaagagttaggagttctgtggcgccccccgtaccgtatcgccttaaccggaaggctgcgcgcagggacatctcgactgcgactacgtattcatggcaccacagccgccgcagcggccttacctgaaaatgccgaagctgcggcagggcaggttgcggcagcccatgaaacatatggcgaacgctttcaaccgcaagaacttgagcgtatgcttgacggtgttgcaaccgggctcgcaagcgtacccgtactccgtcgcgcaggtggtgaaaacctgtattttcaggggtcacatcatcatcaccatcactga

SEQ ID NO: 1142 - DNA, 1614 bp, Artificial Sequence
  6xHis UPI000243A177
atgtcacaagcgatccaacataattcgcaggttatgatgacacgtcatccgaatttcttacgtaccgcggaagcactgcgtcctgcactgtcacgccaggcccatccacctattgctgtcgttgaagcacatgcggatgcggctgcgctctttgggtggcgggcggaacctgtgagcaccttagcagccttctatcagcgcgagctgtcaagcggcgattcagtcattattgatttcgggagtcactacgtgggttatctacactttttatgtcagtcagcgggtagtccgccagacgcgcctgcccatctgcaattaaccttcggcgaaactctgagcgaagtttgtgaaccgttttctgattaccagggttggctcagttcatcgtggctgcaacagcaggatttgtggctggatgttttgcctgccgaaatagatctgccacgccgttattgctttcgttatctgaaagtggaagtgaaggcagtgagccggaaattccgtctccagtttacccaaattgaagttaacgcagtgacgagcgcttcgggtgcatgcccggcggcaacgacttcggatccgcaactccgtgcgatcgataatgtggcagttttgaccttgcagaattgtatgcaggaagttttcgaagacggtccgaaacgcgaccgtcgtctgtggttaggcgatttacgcctacaggcccttgtgaatgatgtgacctttgcgcgccatgacctggtacgtcgctgcctatacctcttcgccggtcacacccgtgaagatggtatggtgagcgccaatgtgttcgtacaaccggatgtgatcgccgatgatacctttctgtttgattactccctgtttttcgtagatgtgctatacaattacctgcaatcagcggaagatatggcgaccgcgcgcgaactgtggccgaccgctcgacgtcaggttgaattagcgctgacgagatgcgacgcgtccggtgtggtacgagattccgacgattggtgggtatttatcgattggcaggcgagcttgaacaaacaggccgccgcacagggcgttctaatctattgtctgcagcgcgctatttggttggccgaacgttttgagcctgaactggcggtgtcgtatcgccagcgtttacaacagctgaaaagtgcggcgttagatgccctatgggatccccagcaaggcttttacgtttcaggtgcacgccgtcaggtgagttgggcctctcagatttggctcgtattggcggaagtaggcacccctcaacagcgtcgcgaaattatgcgtaacctggagaaaaacccgcctgcagttgctatgaacactccctacctccgtcaccattatattgcggcgctgctgcaatgcgggctgcgtgatgaagccatcgcacagattaaggcgtattggggcgcaatggtagattatggcgcagatactttctgggaaatttttgatccggcacatcccgactttagcccgtatgggtctaaactgatcaattcctactgtcatgcgtggtcatgtaccccggcgtggtttattcgtcagtatggcctggaaaacctgtactttcaaggctcacaccaccaccatcaccactga

SEQ ID NO: 1143 - DNA, 2814 bp, Artificial Sequence
  6xHis UPI0001B24769
atgaagcagtgtatgggtatctggctactgtttctgtcactccagacctggggacagcaattacaagtagtacatctccggacggataacaagactaaccctctgggttgtcagttaagcccacgccttagttggcagcttagtgctagctataacaactgtgtccagcaggcataccaattacagttttctgatgacagcaccactttaaattcgaaaaaacatactgggaaacatgtggaatctgcggatccgtttttaaccctgcccgctgcgttcgcagggattactttactgccagcgcacacgtattactggcgcgtacaagtgtgggataaagcgggccgtccttcaggttggagcgaagtggcctcgttcatcaatgcactcaacggtccggccgactggaagggagccaaatggatcggttatgaagatgtagtcgactcgatgcgggtagtgccgggagttcataatggcaccgacaaattttaccaaaaacacaaagctcgtcagcgcaccatagttccattattccgcaaagcattttccgtgcaaggtaaagttaaaagcgcgctcctgtacatcagcggtctgggccagtatgaggcaagtctgaacggtgtacgcttaggagataactttctagccccgggctggactcactacgatgaaaccgccttgtacaatacttatgacttaacgaacgttttgcaagcgggcgaaaatgcgttaggagttatcgtcggtaacggctttttcaacgtcaacaaagaacgctatcgcaaactgtcggtcgtgtacgggatgccccgcatgatttgccgactgcttattacctatgaaaacggcaaaaccacgaacattgtgtctggtacggattggcgtacgagtgcgtccccaattacgtttacatcaatttatgggggcgaagattacgatgccggcaaagaacagtctggttgggatcaacctggtttcaatgataccgaatggaaaccggctattgtggtaaaggccaccgaaaagcgcctgttaccggaggaagactatcctgttaaagtcatggaggttctgccggtccgccgtattacccaacctcagccggcagtgtacatgtatgatttcgggcagaatgcctcgggcattataggcctgaaaattaaaggcaaaaagggtcaaaccgtgaagttgattccagccgaactgacgaatgataaacagctggctaatcaaaaggcgacgggaagcccgtattattttagttatactctgaagggagatgggatcgaaacttggcagccgcgcttctcgtactatggatttcgctatgtccaggtggagggtgctgcgccggataccgcagtacacactggagacgtgccagagattattagcttagaactgctgcatacccgtaacgccgctccggtaaacggcaccttttcctgcagcaatgatctgttcaaccgcatccacacactgattttgtgggccattaaatctaatatgcagtccgtgctaaccgactgtccgcatcgcgaaaaattgtcttggctggagcaggattacctgatgggcaatgcgattcagtatagctatgacatcgatctcctgtaccgaaaactgattcgtgatatgaaagaagcacagaccggtgaaggcttagtacctgatatcgcaccagagtttgttttttttgatgatcacggcttcggtttccgcgatagtccggaatggggtagcgcgggagtaattgtgccgtggttacattaccgctggtatggcgacaagacggtgatctcagatgcgtacccgatggtgaaaaaatacgtggcgtacctcggcgcgaaagcccaacacaacattttgagctacgggttaggcgattggtttgataacggcccgcagcggccaggtgtggcgcagcttactcctaaaggagttaccgccacagccatttactactacgatctcgtgttagcgggcaatatggccgatctactgggcaaaacggctgaagccaaagcgttccgcgtgcaggcagacaaagtgaaagccacctttaatggggaatattttcacacgggtacgaaagtttatagcaccggctcacaaaccgcaatggcaatgccgctgtgcgtgggactagtagaagagcaataccgacaggccgtgttttcgaatatggttgatagcattcgccagcagcgcaatcagctgaccgcaggcgacattggattccatttcctggttcaggcactgcaggagggcggagctagtgacctgctgtatgagatgaacaataggtcagatgtgccgggctacggctttcagctagcgaaaggtgcgacgactttgacggaaagctgggcagcgctggaacaggttagcaataatcacttgatgctcggccatcttttagaatggttttatactggtttaggcggtatcacccagcaggccggttctattggttataagcagcttcaaatctgcccggaagtggttggggatatcacatgggtgaagacatcatataacaccccatacggcaccgtccgctcagaatgggaaaagaaagatggaggcatgttgttccgtattagtattccgccgaattcgaacgccattgtgaaattaccggcgaaacgtgaagggcggatcaccgcggatggtaagccgctgaataaccaggatctctcctttgagaaagagcgcgtagtaatgtatctgggctccggtgattatgaattcagcacatttaaagaaaatctctactttcagggcagtcatcaccaccatcatcactga

SEQ ID NO: 1144 - DNA, 2766 bp, Artificial Sequence
  6xHis UPI0002BCAF6B
atgaacaacgccccgtatgatctccgcatcgataccggcggtgatcagtttgcagttagcggccctgcccctcgtctgtcgtggaaacctccctctgataccggtcaccctgcgggatacgaattagaatgtaccgtggacggggacgcacaacctgccctgcgtgtagctccggggcgtcatcgcttcttaccgtggccgtgggctgcactggggtcaggccgccaggtcgagtggcgtgttcgtgcggatggtccgggcggtccgacgccatggtctgagtggaacgcatttgaggttggcctgttagatgaagattggcaggcgcgttggatttctccggccgaaagtggtgatcctggatatggcaaacgtccagcccacacattgacagcgcgttttgaagtgcgtgcgggggttcgctcagcgcgcttatatgcgactgccctgggactttatgaagcatacgtaaatggcgagagagccggaaccgccgaattatccccgggtagtacctcctatgaccgcactttacatgcccaagcctcggatgtcaccgctgcagtacgcgcaggcggcaatttagtagaaattgttctgagcgatggttggtatcgcggtcaggttggtgcatttcgtctgccggcgggctggggtaccgtacttggcgcacgtgccgaacttcacatcgcgtatgaagatggcagtcgtcaagtggtgcgctctgacgaaacctggacctcgactcgctcggccattacgcgagcggatttaatggatggccaaagcaccgattttcgcgccggccgagacacggagcagccggtgctggtggaccgtgtggaagcagccgcgatcgattggagcccggccccgccagttcgcgttgtagccagccgtcccgcgcaaagcgtgaaacaacttcgagatggtctttggattgccgatttcggacagaacgcctccggtcgtctcgccgtcggcgatttgggtccggcaggcactcgcaccgttattgattatggggagcatgtgggtcctgatggcgatctcactactgcccaccttgatagcagtcgtccgggcgaagaaccgatcccgttcgttcaacgcgacgaagtggtgagcatgggccgcggcgaaacatttgaaccacgtcacactgttcatgggtttcaatatgctcgcatacgtcgtgatggcgccccgctggaccctgcgagtctgacgatgcgcgttgttcacacagatctgcgccgcgctggctcgtttgcgtgttcagacgatgatcttaaccgtttgcacgagattgcggactggagcttccgtggtaatgcggttgatgtgccaacagattgcccaacacgcgaacgtctggcgtggaccggcgattaccaggtgtttgccccgacagcgacacgtctatatgatgtccttggctttagcaggaagtggcttcgcagcgtgcgtgacgaccaactgcctgacggtcgcatcgcgaatttctcgcctgatggacgtcgcattaagcatcatctggatgatcaatttgccatgatgactggttcggcgggatggggcgatgcgatcgtcgccgtgccgtgggaactgtatcaatcgtatggggatcaggaaatcttggccgagaattgggaggcaatggtacgttgggttgagtgggcgttgcgaaccgcacgtaccgcccgtcaccatagtcgacgcgaacgcagtgcagagccgcgtccacatgagcgctatttatgggatggttcgtttcattggggagaatggacggaacctcgtactaaaaccgctgatggcacgcgtattgatccggtaaaaacggatccggttgcctggtttatggcggacaaaggagaagttggtaccgcatttttgtatcgcagcacgtctaccttagcagacgtggcacgggtcttgggacgtacggaggatgcggcccgctacgcagaaacagcagagcatgtacgtgatgcctggcgaacagaatttctgacaccggatggccgtaccacaggtgatacccaagctggctatgtgcgcgccttatccttaggtcttgttccggcggaactgcgtccggcggcggcggctcgtctggtcgaactgatccgttctgctggcacacacttaggtactggctttctcgctaccggtgacctgctgcctgtgcttgcggatacagggcataccgatatggcgtatgagcttctgttacgccgtacagcgcccagctggttgtatatgttagatcacggcgccaccacaatctgggaggactgggaaggcatagacgagaatggagatgcgcatgatagccttaaccattatagcaagggagccgtaatccgttttctgcacacccatacattagggctgcgacaggccccaggctccgtcgcatgggaatcggttgaagtcgcgccggtgccgcatccgagccttacatgggctcgtggtacccatgagagccctcagggtacaattgcagtggagtggcgtacaacaggcgatgaattaaccctggcggttgatgttcctcctgccacaaccgctcgtgtggttttcccagatggcaccaccgaaaccgcaactaccggcaccttccgtgcgactcgtcgtattacctgtgcaagcagcgcccgcagcgcgcgtgccccgggtgatgaaccgcttgtccgcagcgaaggagccactgatgaaaatctgtacttccagggctcccaccatcaccaccatcattga

SEQ ID NO: 1145 - DNA, 2607 bp, Artificial Sequence
  6xHis UPI0001966B28
atggatgggggcccgttattcttgagttggcagtgtactggaggcctgcgccagactgcgtacgaaattcatctgacagccgatgatgcactggtttgggagtcagggaaagtggccacccagtctatgcacgccgatgcgccagctgttgaaggagcccgtgtgcgcggcagttggaaggttcgcttgtgggatgaaaataattgccctggcccgtggagtggcgcccgttttgaaactggcttgagcacgggggaatggcagggcctgtgggtcgcaccggaaacggccccactggacattcccggtgacgatgcaattaatgcgttcgcacgcccgaattgggaacgcaaacaggcggaaaaagaagctgcgggaaagggtgcagccgaaccgtaccagccccatcgtccggcgtcatatcttcgtaaaaccttcaccgccccgagtggccgcgggcgcctgtatatcaccgcaaaagggttatatgtagcgtggctaaacggcgtgcgcgtgggtgatatggtcctggcgccgggctctttcacagccgacaagcatctgggcgcgcagacctacgatgtgaccgcgctgctgcgcgaaggcgagaatgaattactgattgcgctgggcgacggttggtaccgttctaccagcggcgttgatggcgatcgcaacttatttggcgatactctgggtgtactgttccagctcgaagtggatggcaaggtggtatgcgtcagcgacgatactatgcaggccacgcaacagggcccgattcgccaaaacgatctgcaacagggggaagtgtacgatgcacgtctggaaggcctgctttcggggtggcacgaagttcagacgtaccgtgatgcgcttccggttaccggcatgaacaccgtcccgatacgtgaacgtgaagcgttccctggtcgtttatttactgcaccgaatggtgaaacagtgttagatttcggtcagaacatcgccggctatgttgaaatgacccttacagcacatgcggggcaaaaggtgttgctgacatgtggcgagaccctggacgagaacggtaattttactcaggaaaacttccaggatcgtagccgccataacgaggggggtacggcacagatgctggagttaatttgtaaggaaggcgtcaaccattggaaaccgagctttaccatcatgggcttccagtacgccaaagtggaaacggacgccgatctaaccggagcggttttcacggcccacgcagtgtatagcgacatggccgtgactgggagttttacctgcggtaacaaggccgtcaatcgcctggtggcgaactcaatttggagtcagaaggggaacttttgtgacattccgacagattgcccgacccgcgaacgcgccggttggacgggggatatgggtgtatttattgaaaccggtctgacgttaatggactgctacccggtggtggcaaaatggcttaaggaatgccgcttaaatcagtacccggatggccgtatggccaatatcgccccccctaactccaggccgggatacatgacaccgatgctgtgcatgagtgctggttggggagacgcggcgattcttgtgccctatgccctttataaacgcaccggtgaccgtcgcattctggccgataattacgaaatgatgcagcgttggtacgcatttttgttaggtcgagcacagcagaccaccgaagaacagcaatcgggcgaatacgccaagtacactgttctgaacggactcgactatggcgaatggtgcgaaccgggtgtaacgccaatgcaagcaatggctaatccgcgtaaatccgtgggcaccgcatatctagcctatagcggtcgtttgcttgccgaaattgcggccgtgcttggccgtcaggaggaagccgatgcctatcgcgcaacggcggataaagcagttaaggcatatcgtgcggcgtttaccgaagatggcgttatccacagcgaccgccaatgtgaatacgtgcgtgctatcgcatttgctctgctgggtgaagaagaatcacgcgctgcggcaacgaccctgaatcaaatggtggtagataacgggtgccacttaaataccggttttctgtcgaccccgtttctgtgtggtgtgctggcccagtatggatatatcgacacagcgtaccgcctgttactgcagccggaagctccaggttggctgtacgaagttaataaaggtgctaataccgtgtgggaaacttggacgggcattgatgcggaaggcaaaccgcacgaatcactgaaccattactcctatggtgctatctgtgggtggctgtttggtggcgtctgtggcattcatttcaccgatggtcagcttacaattgctccgaccccccacaaagcccttggctatgcaaaagcggtttatgactcaccagcggggcgcattgaatcaggctggcgctatgaaggtgatactgttacatacgagtttacgatcccgaccaacattaccgcccatattcatctacctgatggacgcaccagaatgttaagcgccggtactcatcgcttagaaaacctgtattttcagggcagccaccatcaccaccaccactga

SEQ ID NO: 1146 - DNA, 2886 bp, Artificial Sequence
  6xHis UPI0001F8A51D
atgacgacggatactcgcgttgccgccgtgaaagcggaacttcgcaccgattcaccgttcgttgcaacccctactcctcgcctgacctggcgagttgaaacctcaaccccctcttggcgtcaagcgagcgcagaaatcaccgacggcgcaacctcggtacctctggaaggggccgagagtgcactggtcgcgtggccgtttgctccgctggaaccgggtgaacgtcgcgaagtgcgcgtacgagttactggcgtggatggagcggtgactgcttggtcggctcccctcgcagtcgaagccggctttctggctccagatgagtgggttgcagaacccattggtttagccgatccggaacgcgaagcacagccggcgctggtgcagacagctttccgtttagatcgtcctgttcgccgggcgctgctgttatggactgctctggggagtgcggaaccggaaattaatggtcgtgctgtaagcgatgatgtactggccccgggttggtcggctactcgtgatcgtcttgtccatgaaactgtcgacgtcactgacctactggtagagggtgataatgtagtgggcgctacgcttgcgggagcatggtacaccgaacgctacgggttttttacctttaccgatcgcatctatggcgatcagccggcctttcttgcccaattacgtgtcacgtttgcggacggcacagtggaaaccgtggctccgacgggcagcgcgtggacggcgacaggagatgctgaaattgtgacttctggcatttacgccggagaacaccaagacttacgtctgcgtgccccgtggagtacaccggatgcaacaactagtggcactgaccgccgctgggcccccgcccgtgttggggtggtagcccgtccaggccatgaaaatgtaccgcttcccgaagcccgtattgccgaacctgtgcgcaggcatgaatcattgcccgtagtggctcgtttagccacgccgtccggcggagaagttttggattttggtcagaacctcgttggtcgtttgcgcctgcgtgtgcgcggcgaagcagggacgacggtgacaattaggcatgcggaagtactggatgaaggcgaactcgccctgcgcccgctccgtaatgcaaaagcagaagcgtcgtttgtgctgagcggcggtgatgacgtgttagaatctcgcttctcgttttacggcttccgctatgcgcagattaccggcattgatgtgacagatgcgcaggtagaagccgttgtattacacagcgacatggaacgtactggctggtttaccagcagccatgcgttagtgaaccgcttgcacgaaaacgtggtatggggtatgcgcgggaatttcttagccctaccgacggattgtccccagcgcgatgaacgtctgggttggactggcgatctgcaggtgtttgccccgacagccagcttcctgtatgattgtgatggctttcttacgagctggctgcgcgatctggccttggaacaggagcgtgcaggtgggatagtgccgctggtaataccggccgcgttaccgagcttcgccggagggggtccagttgcagcctggggtgacgcagccgcagttaccccaactgtgctgcatgagcgttttggtgatattggggttttagcggctcaataccccagtatgcgcgcctgggttgaagcagtacgggctgatgcgggcgatagcggtttatgggccggtcgtatgcagctgggggattggcttgacccgagtgcgccgcctgatcagcccggcaaagccaaggtggatggcgacattgttgcaaccgcctatttcgctcgtagtcttcgtcaggtagccgaggcagcagccctccttgaaaacactgcggatgccgagacctaccatgcgctggctgaacgcagtcgtcgtgcttttgtttcggaatacgtgacccctgctggtcggatgatgagtgacgccccgaccgcctacgctctggcgctggcattcgatctggtacaggatgcccctacccgcgcggccctcgcggatcgtctggcggcccttgtgcgcgaatctggctaccgcattagcacaggctttgttggaacaccgattatcgcagatgcgttgtcagatggcggtcatcatgacgcggctgaacgattactgctgcagacacagtgtccgtcatggctgtaccctgtgacacagggtgcaactaccgtgtgggagcgttgggatagcctgctgccggatggcagtgtgaatccaggcgagatgacgagcttcaaccactacgcgttaggtgccgtggcagactggcttcaccgtaccgtggcgggtttagcgcctgccgcgccaggttatcgccgccttagagtggcgccgcgtccacttgcagctttcgaacatgcatctgcacgtcatttaactgcgtatggcccggcagaagtttcgtgggaacgcgaaccagggagtgatgtggtacgtgttcgtgccatcgtgccgccaaacacgaccgccgaagtcgctctcccaggaaccttagcagatggttcagaagcccctgcagaagtgggcagcgggacccacgaatggcgtgtaacccttccggcggtgccggtgcgccctcccttaccgggcttggaagctatgctcgcggatgtgattgatgatccgcgtgcatacgccgcattgttagatgcgctagaagaaacagctcccgaacgcgtggaaggtgttcggagcggcacggtttggggtgccggacgcccgctcgcgtcggctctgatgtttacaccgcccgatgttttagcacgtgtcgaccgcgcagtgcgagacgcaactgcggagaatctctactttcagggttcccaccaccaccatcatcattga

SEQ ID NO: 1147 - DNA, 3237 bp, Artificial Sequence
  6xHis UPI000053767B
atggcaagcgttcgtcctcaacaacttcgctgcgaatatcgtgtaaacccgcagggaatagatgtgaaggatccgcgtctgtcgtggattcttgccccggttaacccgaaaggccggggcttaacccagtctgcgtaccgtatcttagtgagtagctcagaggccgcgctgcgcggtaattcgggtgatctctgggatagcggcaaaattgtctcagccgaatcgactcaagtggcataccagggcaaacctttaaattcgggcaccgcggcattctggaaagtccaggtttgggatcaagacggtcaaccgtctgactggtcggcccccgcccaatggagcatgggtctactgcgcgcagaagattggaaaggtcgttggattgggcgtgatgaagctggcgtttataaggattcggcgagcgattaccaattgttggaacgcgcgcgctggatttgggacgcgggcaatgcgcaggcaggcgcgccggtcggaaaccgatttttccgcgccgcttttaccgtccctgcaggtcgtaaagtaacccgtgcgctgagtgttatcggagctgacaacaccgcggatgtgtatcttaatggtgagccgattgctgtagaaagcaaactgcctctgccgcacgcggtagatattacgcacctggtgcgccctggagaaaatgtcatcgcagtacgagccacccatagccgagcggaccgtccggcgggtctgattggcggcgttcgtgtagaatttgcaagtggagatcctgtgctgctgcaaacatctaaccaatggcgcactgtagcaaaaccagatccgggttgggagaatcctgggtttctggacgcggcatggcaggcaagcaaagatctaggcgcttttggaatggctccttgggaaggtgttgggttcttagctcaacatcgtctgccgggtcgtctgctccgtaaagagtttgcactcgaaaagaaacttcgtcgcgcgaccgtttattactccgggctcggtctgtcagagctgtatctgaacggtgcgaaagtgggagatcatgtgctctcgccaggcctgaccgattatgacaagcacgtgctgtacgtaacctttgacgttacccgtcagctggtccaaggcaaaaatgccattggacttatgctgggcaacggccgctattatgccccgagaaatgatgttccgatcaagacccgtgactttggttatcctaaagcactggttcagttggatctggaatttgaagatggttctcgcgcaaatgtggtaagcgacgaaacgtggaagtattctgcagatggacctatccgtgccaacaatgagtatgatggtgaagaatatgatgcgcgtcgtgagattgcgggttggaacaaagcggggtttgatgatgcgggatgggaggccgcgaaaattgtgggcgcaagttccggtgccgttgttgcgcaaatggccgagccgttgagggtcaccgagactgtgaaaccgttaggcgtgaaaaaattacgcccgggggtgttcgtgttcgatatgggacagaacctggtgggttggtgtcgcctgcgcgtaacgggaccaaaaggcacccaggtgaaactccgtcattcggaaaccttaaaagacgatgggagcctgtatgtggataatctacgctcagcgaaggcggaagacatatatacgctgaaaggtgtcggtgcagaagtgtatgaacctcgctttacttatcacggctttcgctatgtcgaagtcaccggctttccgggggaaccttcagcgagtgccttagatgcacgtgtggtccatgatgatatggagcgtgccggtgaatttaccagttcaagcggtctgctcaataaaatccaccacaacatgttttggggaattcgtggcaattaccgttctatccctacagactgcccgcagcgcgatgaacgacagggatggctgggagaccgtggccaagtctcccgttcagaatcgtacatgttcgatgtagcgggcttttactctaaatggatgactgacttggaagatagccagcgccccagcgggagcattccggatgtatcaccgaactactggccattatacaatgatgacctgacctggccgggcaccattatctttatccacgggatgctatacgaccaatatggtgataaacgagtactggcgcggggctatccggccatgaaaaagtggatggattacgaaaaaacctttgttaaagatggcctgatttctaaggaccagtatgccgattggtgcgtgcctcccgaagaccccaaattaattcattcacaggatcctcgccgcgtgacagataaaaccctgattgcgacgtcctactactatcagttccttcgtaccatgtcgcggtacgcccgtattttagatcgccctacagatgcggcggattttgataaacaggcggatcaggtacaggacacgtttcagcgccgtttttttaaactggaatcaggcatgtatgataatggcacccagacctcttcaatcctgccactgtattttggtatgattccggcagattttcgtcccgcggttgtacaaacgctggttcggaatattgagttacagagtaacggccatgttggtacaggcctagtgggggcgcagtggctgatgcgtaccctgagcgatgcaggctatgctgacttagcgtataaaatcgcgactcagaaaacgtatcctgggtggggctacatggtagaacaaggtgcgactacgatctgggaactgtggaacggcaataccgccgatccagccatgaatagtggtaatcatgtaatgcagatcggagatttagccgtgtggatgtatgaatacctggcgggtattcgcaccgaccctgagaagccgggctttcgccacgccgtgattcgcccgtatccagccggagatctgtctttcgtcaaagctacgcataagaccatgtacggacctctggcgagctcctggaaacgcgagaaaggcgagtttatgctggacgtgaccgttccggccaacactacagccaccgtgtgggtaccggcgaaagatgcagcttcagttacggagtcaggtaaaaaagctactgatgttaaaggtgtgaaatttgtgcgaagcgaaaacggatctgccatcttcgaagtgtcttctggcgcctactcattcaaaagtggtatcgagaacttgtattttcagggaagccatcaccaccatcatcactga

SEQ ID NO: 1148 - DNA, 3228 bp, Artificial Sequence
  6xHis UPI0001A3EFE6
atggagcaagcggtggcggcagcgttagcagttactgatctgcgcatggacggccgaaccgagccgctgggactcggcgagagtgcgccacgtttttcctggcgattagccgccccaggacgcggtcgtgcacaaagcgcgtatcggatagttgttgggcgcgaatgtgacccgctggccgaaggagccgaagtcctgtgggatacgggcgaagtgggcagctctcgcacctttgatatcgcctatgaaggcgcggaactccgtccgcgtacgagatatcaatggcgtgcacgtgcggccgatgaagcgggtacttggggcgactggtctccggcccattggttcgaaacgggtctgggtgatgtgaccggatggaccgccgattggattggaaccccagctgtaccgggcagtcagcgtctgccttcactggagaatgtaccacgtatatgggcggccggaccgctggggccgtcggaggctcgaaccggtggctttcggacccgctttacagtaccggggggggcccgtccgctttctgcttggctggttattgggggcgccctggatccgcaagtacacttaaatggaatgcccgtcgccggagaagtgcgtgatggagcatttgttgcagatgccggcgacctgatcgattccggcgaaaatgttctggcgctgagagcgggcgctgttgatggcctgccgggtggattatgcgtacgcttagaagtcgtgctggaagggcgtccggcgctcccgcaattggttcctgttgcaggtgaaagcgcggtaaccgtcacgtctgatggtcgctggcgtgccgcgggagaaccagccccgggattcgaacagccaggcttcgacgacaccggatggtcattagcggaagaagtggggctgcatggagacccgccccgcggtcgtgaacccgtagcagatcgcccctcaccgtatcttcgccgtgaattcgacgtgccacgtccggtgagtcgcgcacgtctgtatgccacggcccttggtgtgtatgaactgcacctgaacggtatgcgcgttagtgccgatcatctggcccccggttggacggattaccgccatcgcgtaacctaccagacttacgatgttaccgctctggtggcagaaggtggcaacgcactgggcgccgttctagccgatggctggtacgctggcaatattagctggtttggctcatttcagtatgggcgtcgcttagcgctccgcgctgaactggaaattgtacacgacgacggtaccactactcgtcttcgtacagatagcgattggcgcgccggtagcggagccattcgttatgcggatttacagaacggtgaacgtcaggatttagcggcagagccagtggggtggactgcttgcggctttgacgacagcggttggcttccggccgtccccgttagcccgcctgcaggtcgtcctgcggccgccgttgcgccgccagtgcgcgtccatgaagaattagcaccccgcgccgtttgggaaagtagcccaggtgtgtggattgccgattttggacagaacgttgtgggctgggtacgattgaccgcacgggccggccgcgataggccggtagtgctgcgtcatgcggaagtactggatcatgaaggtgcactacatttagcgaatctaagaagcgctcgtgcgactgatgagtttcttccgcgtggcggtgcaggcgcagaaaccttcgaacctcgcttcacgtttcatggttttcgttatgtcgaggtatcggggcttcgcgagcctctgacctctgatgctattcgtgcgcgcgtggcctatgcggccatggagccggcgggcgagtttgcctgttcggatgagcgtctcaaccgtttgcagggcaatattgttcgcggacaacgtggcaacttcttgagcatcccaacagattgcccacaacgtgacgagcgtctgggctggactggggatatttgggcattcgctccaacagcattgttcaattatgacgcaagagcgtttttacattcttggctgaccgatgtcgttgacgcccaggccgaggatggcgcggtgacccatgttgttccggacgtattatccggtagaggtttgtcaccgaatccgcgcgaggccggttccccgggttggggagatgcaattgtgatgctgccttgggccttatatcgtctgtgtggtgacgcagatgcagtggcacgttattacggtccaatgcgtcgttggctggcctatctggattcacgtagtacggatggcattttcccagatgaaggctttggtgattggctctccatcggcgcagatacgccgaagagactagttggcacggccatctttgccttaagcgcccgtcagctggcggaactggcagctgcgctgggtcgtgccgatgacgagagagcctgcttggaagtatacgctcgtgtgcgtcgcgcgtttcgcgccgccttcgtccaaggtccgggggttgtagaatcggggacccagaccgcgtatgtgctggcaattaccgcaggcttactggaagaagcagaactgccgcgtgcagcggcgcgtttagtgcgagatatcgaagctcggggtggtcatctgagcacgggctttcttggtactccctttctgttagatgcgttaacccgcagcggccaccttggaacggcataccggcttttgctgcaagaatcattcccttcctggctttacccagtagtgcatggtgatgccactaccatgtgggaacgctgggatggctggagtcatcaccgtggtcttcaggatcccggcatgaactcatttaatcactacgcctacggtgccgttggagcatggatgtatgaaaccatcggcggccttgcaccagcgagcccaggctaccgtgcaattgtagttcgccctcgtccaggtggcgaactgacatgggcgcgtaccgcctatcgcacccgtcatggccgtgttgaaattgcttggcgtcgtgaagggggtgattttacactggaagtgcgcgtgcccccgaatactcgggccgaagtttgggtaccgggcggccctgcgggcgtgacagaatcaggccgtcctgcggcggaatcacccggcgtggcactggaccgcgtcgttgatggacacgccgtttatgaggttggctcaggtagctatgctttccacgtcgagaatttatactttcaaggctctcaccaccaccatcatcactga

SEQ ID NO: 1149 - DNA, 3384 bp, Artificial Sequence
  6xHis UPI0006CE1E82
atggccgacacattgcgggacggtttccaaaccccgccggactctgcgaaaccgcgtgtgtggtggcactggcttggtaataacgtgactgccgacggtattgataaagatctagcgtggatgcgtcgtgtcggtattggcggcttccagcttttctctggcaacctggaaacccctctgttggtagataaaccggtagtagttttttcaccggaatggcgcgcgatggttcgccatgcggccgaacgtgcagacgccttaggtctggaaatgactatggccgcgagcgcaggctggagtgagactggcggtccgtgggtcaagccggaacaagccatgaagaaactggtgtggtcagagacggtaatcacgggtgctaaacgcttccaagggcgcctcccgtctcctcctaccggcaatggcccatttcaggatatgccaatgcctcccgaattgcgccttcctcctcccccgccagttccaggcgcgcgtccgagaccgcctgcagcagcccacggcccgtcaccttcttattacgccgatgtcgccgtggttgcgtatcgtcttccggatgctgtagtgcccctgggctcattaaagccgcgcattagcagctcagcgggtgacgcggcgatcctgtctgatggccgttatgacgccccgctgagattggaacaaaaaacaccggacggacaactggcgtgggtagaatatacttttgacaaacctgtgagtcttccggcggtaaccctagccgcgaccattgaagatccgctgaatgcgctttctccgagcggagttgtcgaagttgcggatgagaatggaacttttcgcgacctggtgcgcgtcgcgccacaggaaccagtagcgttcccggccgcggcccctgtacgcactgttgccttgcctgaggcgtcgagtcggcgctggagatttcgccttgatccgatcccgccgcaggcgttagcattaccgggtatgccacagcagacggtacatgctgtgacggaacttcgctttgagacggaggccatggttgaccgatggcaggcaaaagctgcctatgataccatgcggtcttatgataccggtccgcagccggtgcgcccggtgccggcgcgagatcaggttgtgaacctgacggcacgtatcggtgccgacggaacgcttgactggaccccgcctccgggtcgctggcaggttctgcgcatcggctatagcctaaccggagcgaaaaaccacccggcggatcctgagggtacgggttttgaagtggataaattggatgccgcggctgtccgcgcctatctggaaggctatttgggtccaattgatcaggccctcggcgatcttcgcggtgctaagggactgaaaaatctgcttacggattcctgggaagccgggcaagcaaactggacaccggccctgcccgcggaatttaagcgccgtaggggttacgatttaaccccgtggctgcctgtcctaacagggcgagtggtaggttcggcggcggattcggagaggtttctgtgggatttccgacgaactatcgctgacctgttggcagaagcgcactacaaaacaattcgtgattttgcgcatgaaaaaggcctcggatactacggcgaagcaatgggcacacgtttaccgaccactggagacggcttacttaataagcgttacaccgacattcctatgggtgagttctggcagatgccgccgggagcgccgagtgatccagcccatacgagcgacatagcggaagcagcaagcgcagcgcacttctacggccaaaacctggtagcggccgaagcctttaccgccctgccgtttatgcccccgtttacggcgacccctgcagcgctaaaaccgttcgcggatcgctttctggcacgtggtgtaaaccgcttcgttatccatacttctgtgcatcaaccttcggatgatttacgtccgggcattaccctggggccctttggccagtatttcacccgccatgagacatgggcagaacaagcaggcgcctggatgagttatctgagtagatcaagctatcttcagcagcagggacgccatgttgctgatatcgcctggttcgttggcgagggtggtgcgatttcagccccagacccagatcgtctctctccggcactgccgaagggataccgtcttgatttcgtagcccgggacgccgtgacagaattactgtcggtgaaagacggccacctgttagcgccatcgggtgttgtatatcgtcttttagttgtacctcctgatgcccgtagcggtgatctgaagctgtcactggccgtgctacgtcgcttacgcgatttactcaaccaaggtgcggccgttctcgctccacgtccgaccggctcaacgagcctaagcgatgatccggcgcaagtagcggcgttgattggcgaactgtggggcgtcgacaccccgatcccgcgcagtattggtaaaggtcgcttgtaccctgcccccgatattgcagcggcattagccgatcgtggcgtggctcctgatctaaccatggctggcgcgatggacgcagatatcgtgtggtctcaccggcgtaccgatgatgccgacatttggttcgtggccaatcagaaagatcgcgctgaatcagtcaccctgagcctgcgcggtgacggccgtgatgtcagcctgtggcatgcagatagcggcgccgtggaaccagcgccgttccgccaagaagcgggccgcacgtccgtgcccctgactctgtcgcccaaccaagcgatttttattgtccagcgcggcagcgcccccgcaaccgcgcgcgatgtagcgaccccagtggaggccgagagtctggcactgagcggtgtgtggactttattttttcctaaaggtcaggccatgcctgattccgtaccgctacccaaactgggcctgtggaacgatatgtcagatcccgcagtacgtcatttttcgggcactgcgacctacgcaacggaagtgaaactgccggccgcatgggccggaaaacccgtgtggattgatcttggtgcagttcacgaagtagcaactgtgcgcgtaaacggtacagaagccggcattgcgtggaaacagccctaccgtattgatgttggaccgctgttaaaagccggtactaacaaactcgaagtcgcagtttctaacttgtggccgaatcggattgtaggtgatgctggcggagcaggcggtgtgcgtgtgacgaccaatacgcatccgctgctccatccggacaccaaagcgcgtttgctcccgagtggtctggcgggaccggtgcgccttgttcgcatggaactacccggtggcaatggtgaaaatctgtactttcagggctcccaccaccaccatcatcattga

SEQ ID NO: 1150 - DNA, 2667 bp, Artificial Sequence
  6xHis UPI000247229E
atgcagtctagcaaagaactgtaccgctctaaagagttcagtatctacaccgataaggtggtgcagggcaaatatattgccaaggtactgtcacctaccgaaatgacgagtgattatcaaagcccggtgaatctttacaagtcgccgaagcttacgttcaaattttcaatcaacggcaaagataacgaaatgatcagcggccaggatcactcaattaacgtaatggcgaaagatggtaaatttattagtccgctcattaccttcggcaagcattacgtcgacaaaaagaatgtgcccgataacacctacctggaaccgaatatcgattttacaatcaggctggatatgcgtaacgtgttgaacgccttcaaaacggatggattctacaaaggcgccgatggcaaaaaagtgtataaagaggactttaaaggtgtctatgtggctggttccaccctgccgcttatctgggatttcgacaatctcgtgcaccacccggatctgcagctgaaagatgatgacggcgatggcatttacgaagtcaaagttgttctgaatgagttcaaagagcagccgtccgtgtcgtctaactggaaactgaaacgtaacattagtgcgtttccgcagtatcaggcatcttctcccattgaaaacgcgatgtacaacctgagcctggatgaaatggaaaacgctatcgaagccgattcaacccttcgcacgggtaaagaatgggcgggcgtctggactcgagacgtgtcttattccattatcctgtccatggccattctgcaacccaaagttgcggaatatagcctgctgcgcaaagtgaaaaacgatcgaattatccaggatactggtacgggtggagcctatccggtgagtacagatcgtatgatttgggctgttgccgcgtgggaaatctataaaacgacgggtgataaaaattggttaagtaaggcatacagcataatcaagaacagcatcgaagatgactggaaaaacgcctatgatccgaaaaccggcttagtgaaaggtgagtcatcatttttagactggagagagcaggagtatcccaaatggatgcagcctgccgacatatatgaatccgaatgcctgggtaccaacgtggtgcactttcaagccaacaaagtcttcgcggaaatggctatactgctgggccaaaagaccgtaagtgacgaacacaacgcgattgcccagacgattaagaccggcattaataactacctgtggattgcgaacaagggctactacggccagtacctttacggtagaaattacaaaattctttcacctcgctcggaggccttaggagaggctttagccgtaatttttggcgttgctgacaatgagaggcagaaaaccattgttcgtaacacccctgtgaacagctttgggatcccgtgcttttacccgcagttaccgaacactccgccgtatcataacaatgcagtgtggccatttgtacaaacctattgggcgctggcggccgctaacgccggcaacgagcagtctgtcatggaatcgattgcagcgatttatcgtccggcggccctcttcttgacgaacaaagagaactttgtagcggacaacggggattttgccggcacacagattaacagtagcaacatgctttggtcccttagcggtaacattgcgctcgtttataaagtcttgtttggcatgcagttcggcgcggatcgccttacctttaagcctaccgtgccacaagcactggccggaacccgcatgctcaccaactttaaatatcgcaatgccctcctgaccataagcatgcaaggttttggaacgcagatcaaatcgattacgatggacggaaaaccgctcgtgaatgcgatcgtcccggcgtcgctgacgggcaaacataccattaaaatggtgctgaccaatatgatggaaagctcatctaccaccattctcccggcatatacctcgttaaccatcccgcaagtggaacttaagaacgacgagatcgtgtggaagaaagtaccaaacgcagtgagttatgttttcataaaaaacggcgaccgcattgacaatgggatcgataccgcatgcattattaacaataatagcttcgcggaataccaggtcattgccgtagataagaacggagtagagtcgtttggctctgaaccgctccagattatcccggaacagacggtcaagacgattgagattgagaacctaacgtcgaaggccgatctgccctataaagggtatagcggtgacggcttcgtcgaaattagcacccaaaaaaacaccatcctcagctttgaaaccactattactgaggctggtacctacgcgatcaatttcaaatatgccaacggtaacggtcccattaacacggaaaataaatgcgcgtttcgcaccctgaagctgaacaataagcaggttggtaccgtcgtactgccgcaacgcggcacgaacgaatggagcgaatgggggatgtccaacagcgtgatcgttgaactgaaagctggcaccaacaagttcgatctgacctatgaaacaaataacgcgaatatgaacggcaccgtgaaccaggccatgctcgattatgttcgcattgtgaaggtcgaagaaaatctttatttccaagggtctcatcatcatcaccatcattga

SEQ ID NO: 1151 - DNA, 3120 bp, Artificial Sequence
  6xHis UPI0002CB9583
atgaaagttgatatcactaagattttcacgattttatttgtgatcgccttcgcaggatgcctgctgcaatcctgcaattcatcgatcaacggccttgaacagggcttctttaaccccccggactccgtgcggccgggtgtgtattggtattttatggatggtaacctgtcaaaagaggcgatgacgaaagacctcgaaagcatgaaggaagcgggaattggccatgtagtgtatctggaagttaacgtgggggttccgcgcggcagcgtagattttttatctgatgaatggcaggaaatgttcgcgcatgcagttgccgaatgcgaacgcctgggcattgacattaccttgggtgtgggtccaggttggactggaagtggtggtccctgggtggaaggcgcacaaagtatgatgcacctggtttcatcatcggtcaacgtgtcagggaaaggtaaaaaaaccattgcgttaccgaagccgagtccaaaacctcatttttttgcggaagataattttactccggagtcaaaaaaacgctgggaggaatactacgaagacgttgcggtgttagcctttccggctggggcgtcgaccttcggaaccgattatgaagcgggtagcgcgtatctgcgtatcaccgggatcgaagagaaggctctgtactatcgtaaaccctacagtagcgttacacaggtcaaaccgtacctaacatttggcaaggactcgttcaccgtccagaccgttgataaagactgcatcattgatctgaccgatcatctagagattgacgggactctgacatgggaggtcccggaaggtgactggacaattatgcgtttcggtgcacgcaataatggtgctgtaacacgaccggctcctcacccgggtgtaggtctggagaccaacaaattcgataccacagccctgaacgcgcatttggacaagttcgtgaccaagctctttaaccgcgttggttttaaaaaagcccagcctcagggtggtttgcagatgctgcacatggatagctgggaaatgggagcccaaaattggaccacgcactttcgtgaagagttcacgaagcgtcgcggatatgacccgcaaccgttttatcccgtgtatgcgggttttattgtgcagagccgggaagaaagcgaacgctttttatgggatcttcgtgtaacttctcaagagttaattaaagaatatcatgctgggcacatcaaatcctacggaaagcgttacggtctaggtctgtcaatcgagccttatgatatgaaccccaccgccgacttagaactggcctcagtagcagatatgcctatgtgcgagttttggagcgtgggttacggctacaatacctcctttagtgccatggaaggcaccagcgtggcgcatcttttaggccagccggtggtcccggcagaaagctttaccgcttacctggacggctggcgtcagcatccgggctcgatgaaaaaccagaccgattgggcgttagccagcggtatcaaccgtctgatgttccacaccttccagcatcagccgctgaatgaccgactccgcccaggcatgaccatggggccgtatggtgtacactgggatcgtaaccagacttggtggccgatggcggacgcataccatcgctatatttcgcgctgccaattactgctccagcaagggcgtacagtggcagacattctgtatttaacaccggaaggggcgccgcacgtgtttcgagcacctatttctgcattagagggcgatctactggataccgacaatttgttcaatttccgcaacgaaactccgctgccagatcgcaagggctataattttgatgcctgcccgccaagccttttctatgacgcacaagtaaaagacggcaaagttgtcttcccgagtggagtgtcctatcgcctccttgtcctgccgtgctttgaaaccatgaccccggaattattagagaaaattcgtgatctggttaatggaggcgcgacagtagttggcctgccgccgcaaaagagcccatcactggtcaattaccctgtttgtgatgagaaagtacgtgtattagtgcaagaactgtggggcggttatgaaatcccggaaaccgtggaaatacgttctattgggaaagggaaagttatttggagtaaggaactactggagcaacaggacaacctttatccgacttacgaatatacggccgatattctggcgaaaatggatgtacatgaagacttcgaatcgactggtgagatccgttatacccatcgcaccatgaaaggttatgagatctattttgtgtctaatcgcaaagatagtcccgtgactgtcaactgcaaatttcgcatgaccggccacccggaactttggaatcctatgacgggagagattcgccccctggcagagtacacggtgaccggcgtgcatacgaccataccgttactgtttgacgccaacgaaggatacttcatagtgttccgcgacaatactttccaacgtgaaattcagaccaagaagaattttcccgattcgaggcgagtcgcctccctgactgcgccgtggagcgtaagcttcgaccctgcgtggggtgggccagagcaggtgaccttcgaaaagctgacagattggacacagcacccggattccggcattcgttactactccggcaccgcgatctatcgccagacgttcgatagaccggcggataattcgaaacagcaattcctggatcttggcaaagtgaaaaacttagcgcgtgtgcgtttaaatggtcaagatttaggtgtcgtttggaccgctccgtggcgtgtagaaattaccaaagcgctgaaactgaaagataatcaactggaaatcgaagtggtaaacctgtggccgaaccgtctcatcggggatgaacagctgccggacgatggtattcgaaatggcgaatggcccgaatggttgaaggatggaggccctcgtaccagcggccgctacacttttactacttataaacacttcaccaaggaaagccctctgctggagagtggcttattgggaccggtgactatttggggcattgataatgaaaatttatatttccagggcagccaccatcatcaccatcactga

SEQ ID NO: 1152 - DNA, 2943 bp, Artificial Sequence
  6xHis UPI00021B9B33
atgcaggagtcagcgatttacaaacagatgcgacagaatttccagcagcccccaaacaccgcgaaacccaccgtctatcactggtggctcggtggcgacgttgacaccgtgcgcctcaaggaagagattctgagcttcgataaagccgggatcgcaggttttacgatttttgagatcggatctcgcgacaccgtctttgtaggggccgggccggaatttctgggtgaagcgtccctggagacaatcaaagtggcggtggaagaagcgggtaagtatgggatggaagtggggttgaatacggcgtcttcttggaacgcaggtggtaactggctgacccctaaacatgcagctaaatcgatttatcagagaaaggtcaatgtttctggaggcggcaaagagaaaatcaaactgccgttccccgacattccggagaaagatccgcgtggacgtaagcgtctcatcagctatggcaaagatggcaaaccggtgtattcagaagagattgcggtattagctataccgctcgttggcgagaacgccgcgattgatactagtctgatcaaagacgtcagcatttactttgatgcgaataaagaagtattaaattgggacgtgccggaaggggattggaagattgtgcgctatgtaagctcgaacagcggcgaaaacttagtgttaccaagcaaatacagcgccggcccgattgtggatcatttcgacgcggacgcgactgcctttcattttaactatatcattgatcgtctggagagcaagctgggcgacctgcgaaaaacctcactgaaaaatttatacatggcgagctatgaagctcgaggctttaactggacgccgactctgccgcaggagttccaggagctgaatggttacgatatcaaaaaattcctcccgattctgtttggcgaagttagcctgtctcaggaagcgactgccgccttccgtgcaggcttccagcgcaccctgtctgaactgatgatcaagaacttctacatgaagagcaaagaaatctgcaacgcgcatggccttaaaaacaattcagaagcaggcggtccgggctacccgttgcatgatgtgccggttgaaccgctgaaggccctaggtaaaggcctggatattcctcgcggcgaattctggattaaccatcataatttttctgaagaggggatggatgtcctgcgggtcgttaaagaggtatcgagcgcgagcaatatctacggtgtgggcatggttgagatggaggcgttcactacctttcagcagtggcaagaagggccttatgagatgaagcctatgggtgatcgtgcttttgccgaaggtatgaaccgtgtagtggttcatggtagtacccataacccgaaaggtacaggcaatccgggtatagtgtaccacgccggaactcattataacgacaagcgcgtctggtggaaaaaggttcgtccgtttaatgattatttggcccgtatttcgtatgtgctgcaggaagccgatttccaaagcgacgttttgtactactatggcgataccataccaaactacgggggccataagcgtagtcgctttaatccgggtgagggctatgacttcgaacttttgaacaccgaaatcttgttcggtctggaagtcaagaatggtaaaattattaacccgcggaacggtgccgagttcaaggttctggccttaacgaaagagcatgaaattaatccgaaagtcctgagtaaactggaacagatggcgagtagcggcgcgattattactggccccaaaccgaatcgcattgcaccggaacgcaatatgaaggaactaccgaacatgaatggctggctggacaacttatggaaaccattttcgaagcagtcattcaaaccgggtagcaaagcgatctactacaatgtgtcggtcggggagatcttgaaagccctggaattgagcccagattttagctacaaaggcaatggtttttacactctggactacactcactatcagaagggcgatatggatttttacttcatagtgaacacgaccggcgagtggttaagccgtgatctgatttttcgacaggagggcaaggtccccgagctgtggaaccctgaaaacggcaacatctcaccgattcccatatacaaggaaaccgaagaaggtatttcgctgccgttatcactagccccgcacgaaagcgcgtttgtggttttcaagccgggaattaaaccagtgcatttcaccaaaattgcccacggaggcattcatccgccgaaagtacgttactcagaccagggcattgaattttgggaggagggagaatttggtttgggccacggcgaggataccctgattctgaacaactttccgaacgttaaaagccttgaaggcgcgtgggaaatctattttcctgaagggtggggagccccggataaagccatattcccggagttgaaatcctggacggaaagcgaaaacgaaggcattaaatacttttcgggcacggcccgctatgaaaagaagttcattcatgagatgcacgcgagcgagtatcctgaggcgaaaatctaccttgatctgggggatctgagccacgtcgcagaagtttggctgaacgataaaccgcttgggattacttggtcgaaaccttaccgcttcgatgtaactgaagcgatcaaacctggtattaacaccctcaaaattgaggtcgccaatacctggagcaatcgtctgaccggtgatgcgatcactgggaaagattatacacagactcatgtgaacaatacggttattaagggcatgccgaacttccgagttacctgggaaaatgcgcctctcattccctccggcattttaggtccggttactttaaccaccgtattaccaatcgcaatgcctaaagagaacctatactttcaaggcagccatcatcaccatcaccattga

SEQ ID NO: 1153 - DNA, 2592 bp, Artificial Sequence
  6xHis UPI0000533669
atggcggacccagccaatattaccgaattgcagcgtggttttcagcatccgcctgatgaggcacgcattatggtgcgttggtggtggtttggtcctgcggtgactaaaccggaactcgaacgggaaatgcgtttaatgaaacagggcggcattggaggctttgaagtacaaccgacctacgctctcgagctagataacgccgaaaagggcattaagaacctgccctatatgtcacccgaattcctagaggcgcttcgcttcactggggagaaggcgaaagaacttgggctgcgaatggatctcaccttgggaagtgggtggcctttcggaggaccgcacatccccgttgaattagctagcccgcgcctgcgagtagctcgtgctgcagttaccgctggagcggcagccattaacgtcccggagcttcaaccgagcgaaaaactgattgccgcttttctgggtaaccaggaactggaagccgcaggcagccaaagctttagattgccaccgagcgctgccgggcaagtgactttttttatcagcagtcatacccgccagaccgtaaaacgcccggccgtgggagccgaaggctgggttctgaaccactatgatcgtgccgcaatcgagcagcactttaaatcagtgggcgaaccgatgctgaacgccttagccaagaccccacctgccgcgatcttctcggattcgctcgaagtctataatagtgactggaccggcgattttttagcgcagttcgcgaaacgtcgcggttatgatctgaaaccatatctgccggcattagcaggtgatataggtgaaaaaacgggcgcgattcgcaatgattggggccagacactgagcgaactggcagaagaaaattacctcaagcctctgaccgcgtgggcgcaccagcacaatacaaaattccgctctcaaacgtatggtattcctccggttaccttaagcagctatagtctggttgatctgccagaaggggagggtacccagtggcgtcactttagctcaactcgttgggcgacctcagcgtctcatctttacaatcgcccagttacaagctcagaaacttggacgtggttacatagcccggtcttccgggcaacccctttagatatgaaggcggaagcagaccttcatttcctgcagggcgttaaccaattagttgcgcacgggtggccgtacagcccgcctagtgttggcgaaccaggatggcgcttctatgccgcagccgtattcaacgaacataacccctggtggattgttatgccggatatcgcaacctatatgcaacgggttagctggatgcttcgacagggaaaacccgtgaatgatgttgcggtgtacctgcccacacatgacgcatttgctggctttacattgggccgtgattcagtgaatcaggcaatggagggcattctgggtcccaaacttgttcctactatcctggatgccggttatgggttcgattttatcgacgatggagcgatagcagcaggcggcgttccgcataaaattctgattgtgccgggcgcagaacgcattcctctcgcaacataccagaaaattgaagaatatcgccgtgacggcggcaaagtgttcttcactaaacgcctcccgtcgttagcgccgggtttacgcgaagagggcgataccgccaagattcgtgaactgtctgcgaagcatgtggtaaccggtgatgacggccttgcaggtgcacttcacgacgcgttgcccgctgacttcactgcacctcctgaaatcggtgttgtccatcgcaagctggcgtatgccgatgtttacttcctggcgaatacaagcaaccatgcggtgaaaggggcagcaaaatttcgtgccagtggaatgccagcagcttggtgggatcctgtcacgggcaaaagttcgaaagcagatctgaacttagagctggcaccgtatgaatcccgtgtgctagtattttcacgtgcgggcggtgcagttatgggccaggctatgagcctgccggaggtggacatcagtagcgattggaccatcacctttccgggcgaacagccggtcaaaatggctaccttgcgtccttggacggacgaggaaaaccgaaaattttacagcggcaccgcaacctatgaacgaaaagtgaccgcgacccctgctatggcggcagctcatgtgtttcttaacttcggagaaggtaccgtggccgatcctgcgagcgaacgccgtgctccgtcaggcatgcgcgcctggttagaatctcctgtccgtgaagcggcacaggtgtttgtgaatgggaaacctgcgggtgccgtttggaaagccccatacgaagtcgatgttaccggtctgttacaggctggcgaaaatagcattcgcgttgtagtggcaaatcttgccctgaacgtgttggccaaaggtccacttccggattacaaggaacttaccgccaaatacggcgagaaatttcaagcccaggatatgcaaagcgttcgcgcgcttcccggcggaatgatgggcccggttaaactggtgtctaaagaaaacctgtatttccagggatcacatcatcaccaccatcactga

SEQ ID NO: 1154 - DNA, 2463 bp, Artificial Sequence
  6xHis UPI00032D8F6D
atgacgaaaacgtttaaaattgggttccttttactagcctgcgtcgtatttgtaagttgctccgaaaatcctaagcaggccgattgcggtttgtgtgaatcggttggcgcaaaatggatccaggtagagaaagaactgcctacggaagatagcttattttatctcccgaacccggccccgctgttccgtaaagaattcggtgtggaaagtcacttcgatagcgcgaaactgtttattacggccgccggatattataaagcgaccctgaacggcgaggccattggaaaaaatatcttagaccccgcttggaccgattacactaaacgtgtgtactacgcggagtacgatttgtcagcgcagatccaagaaggcactaattgtttcggagttagcctggggaacggcttctataacccgctgccgatgcgtaaatggggccgcagaaatcctcgtgaagatctgaacgtgggcaagccgacttttattgcacgtctggtgctgtactaccctaatgggaagaccaaggaaattagcacagatgaatcttggaaatacagctacggtccgctgatcaagaacagcgtatatctgggtgtactgtatgataaaggcatggaaattccgggctgggaccgtccaggctttaatgataccggctggaagagtgtgcaggtgggaaaaggacctggaggccagctccaagcagctttctttccagcagtacaagtgaccgaagagattcgtccgaagagcatacatgaaattgaaaaagacgtttacatcgtggacatgggcgtaaatttcaccgggacttataaaatccgactagcgggaaacgtcggcgacacagttaccctgcgcttcggcgaacgtctgtacgaagatggtactctcaatccaatgacgaccgttgtgggtcaaattaaggcgccgggtatcggcggcccgggcagtccagcgattgcatggcaaacctccagttatgttgttgacacggaaccaacatggtttagcccagactttacctatcacaccttccgttatatggagattaccggtctgcagaagcccccgcttcttaccgacataacagggctgtacttccatacgaacgttgaacgtgaaagtcatttcacttcatcaaactcactgttaaaccagattcaggatgcaaccactcgtactttcctcagcaatttaatcagcgtgcagagtgattgcgcggtgcgcgaaaagtttggttacggcggcgatcttaatgcgaccgcggaaagcttcatttacaattttgacatgcgcgacatttatcgtaaaaccgtgtacgattgggtggatgccattaacgattctatttttgtggatacggcaccgtttgcgggcatcaaatattgtggaattagctgggagagcgcgtacctgatcacccagtattacctttatttatattacgacgaaaccgacctggttcatgaattgtatgaagacaacctcgcctggatggataaggtagcccggattcatccggaaggaatggtagattctggcctatcagatcacgaatccctggaaccagtgccggtacagttgactggtaccgcacattatttacagtgcgcggaaattatggaaacctttgcgtcgttgaaaggggataccaagaaccagcagcgtttcgcggaactgagcgaaaagctccgcgcgataatcaaagccgaattttgggataaaccggtaacagaacgcattaatcgccagacgttgtttagcacccttctgttccatcgtatcattccggaggatgagttaggtgccgctcgtgactcactagttcaggcggtaaaaaatggcccgtcaggccagtttaacaccggtatttttggcacaaaatatgtgctggaaactcttagcgaaagtgttccgattgatcaggtgtatgccattgtgaattcaaccaaattccccggctggggccatatgatctctcgtggcgctaccaccatttgggaaacttggcaggagagcgataacgtgtttacgaactgtcaccccatgttcggtacggttactgagtggtattatcggtggctgggcggaattcgtcctgacccaaaacaaccgggcttcaaagcgttcgttttagcgccgcgcaccccgacgggtttagatagtattagttgctcgtatcgtagtccgtacggtgatatcgttagcaactggcgtcgcgagagcggtaatagcgtggtatacgaccttatcatccccgttggcagtgtagcgagcgtttcactcgatatgaaggcagcgcaaggcctgtctatcaccaaagatgggaaggcatttcagcctccggttaccgatgcctcgaccccgggcgagtttaagttagaaggcggtaactataaagttgtggtgagcggcgaaaatctctattttcagggctcacatcatcaccaccatcattga

SEQ ID NO: 1155 - DNA, 2364 bp, Artificial Sequence
  6xHis UPI0000D713F2
atgaattttcagcctgccgcgatttcgggtaatctggttagccgcacctggagtggcgatatgatcgccccgttatcggatggcggacagggcacggccgcaagttttgtaagcaagaccttcgaacatgatggcacgaaactgccggcggaactgttcatttcagcccttggtttgtaccgttgttttattaacggcgtcagagttggttcggatcttttgacgccgggttggaccaattatgatgaccgtctggcgtatcagcgttatgacgtgtcaaacctgttgaaaccaggtctgaatcgcatcgaaatctggcttgcggatggctggtacagaagcccgcttatgtggggtgcccaggctatcccgaattgctggggcgaccgcattggtgctattgcggatctcattggagcagatgggacagttttgagtaccgacactacgtggcgtagtggtgtgttaccgatcctacgcagtggtatttacttcggtgagatttacgatgcacgccaggagaactgtgtcgaaacgcatggtaccgaaaaactggcgttcgataaagcgctactcgtggctcatgaaacggcagcggtccgcgaactgcgccctctgaccgccgttgagaattggaccgatgatgaaggtcgtacaatttatgactttggccagaatgccggtggctacattcgctatacagtgcgaggtaccgcgggcgctgaagtccgcgttgaacactcggaagtgctaggtccggatcgccactttgataatcgtaattaccgcaccgcggcagcgcacacagtgtacaccctacgcggcaacggggatgagacctacgcgccgcatttcacgttccacggctttcgctatgcgcgcgttaccatcaaaggcgatgccaaaatccttgccattgcgagcatccctatttcatctgttcctgaaccggccggcggtttcactagcggcaatgcattggtcaatcgcctggtggagaataccatttggagccaacgtgcaaatttcgtcgaagtgccgaccgattgtccgcagcgcgatgaacgtttgggatggacgggagatgcccaagtattcgctgcaacagcgtgctggctcagtgatagtcaatctttcttacgcaaatatttacgtgatgtaatggccgatcagcgtgaagacggcgcagtgtcccattttagccctgacccgacccgcttacatcctgcgaatttcccaggttacgcaggtagcacgggttggggggatgcaattgttgtcattccgtgggtgctctatacgcattatggtgatcgcgcagtgctgtcggaatgcttagagtcaatggttcgctgggtggactttgtttggtccattagcgatggtcctttagtaaggcctccgagccgttggggtgatcgtggcttcacatttggtgattggttacagcctgtgggcgacaaccgtaaacctaggccgactatagccgatgattgcgcggcgacgctgtaccattttattagcaccgatcttctggcccgtattgccgcaacgttaggcgaacatgcattagaagagaagatgaaacaaagggcgaatgagattcgccgtgcgttcaccaatgaatttattacccctgcgggtcgtctggctcacaacgaccagacatcctatgccttggcgtttcttcacgatttaattccggccgagcaccgccaggccgcacagcaacattttcgccaggtgataattgatgcggattataaaattggtacgggctttatcggtacaccggccttgctgcctgctctaaccaaattagggatggatgatttagctgaaaaagtgttcttacaggaagatgttcccggctggttgtaccaggtgagcaaaggagcaacgacgatatgggaacgctgggattcaatggccccggatggaacgatctacgaaccagatatgaacagctataaccattatgcttatggcgcagtatgccagtggttgttcgaatctgtggcggggattagcccgtcgccgtcagccccgggttttgcggaggtaatcgtcgatccggccccgatcccctcgttaagtccggtttccgcgtaccatgatattagccagggccgtattgaagccgggtggcactgcgatggaaaaaaagttacctatgtgctgaccttacctgaaggctgcattggctggtttcgtccgggaaagcgtcaccagaacccgagtctgaacggagaaccggttgtggaagaggcggttttagcaccaggcacccatcgcctcgtgttctcgctgccgaactccgaaaacttatactttcagggcagccaccaccatcaccatcactga

SEQ ID NO: 1156 - DNA, 2649 bp, Artificial Sequence
  6xHis UPI0001A3EBEB
atgatcggtaatgccgtccattgcgcgccggcacagacgagtccctctcgcagcgatccggcccctccccgtctgacgccgtatggtctgcgttgtgaacaccggcagacccctctgggtgtcggagaacctcgcccccttctgtcatggcgcctggcaagtgcgcgtgcgggtgacgacccggttgcttatgaactggaagtaggcgattggagcagcggacgagtggaggatccagcagccataggcgccgtgtatggtggcccgcctctgctcccacgtacccgttacgcgtggcgtgtcacagtatgggcccgtgacggagcagaagggtccgcagaaagctggtttgaaacgggtcaagatgtatggcaagcctcatggattgctcatgacccggctgcagtagcgcacatggacccgccaacagaaggcgaccaggcattaagccatcatgggcttttgccttgtccgcagcttcgcactagcttcgaaagcactgcaggcgtgactcgtgcccgcctgctaatttctgccaaaggattgtacgaagcgcgtgttaacggccaccgtgcaggggatgccgagctagccccgggttggacggattatcgtagacgtatccagtaccaggttcatgatgtgaccccctttctcttagacggtgaaaatgtgctagcggcaaccgttgcggatggttggtggagcggctttaccgggtttgatcctcgccgtcccggctaccattacggtcgttttccggaacttattgcggaattgcatttaacttttgaagacggcagcacccgtgtggttgcaacgggcgagggctggcgtacgggacatggtagagttcggtatggagatttgctgaagggtgaatgccatgatgctcgcgctgaaacacccggttgggaccttcccggtttcgatgattccagctggcgccccgcggtcgtgacaggcgatgatcattcactgctcgttgccagccgcgatgaaccggtccgcgcattgggggaattactgcctgtatcgtcggttcttgttcgccccggtgtgcatttggttgattttgggcagaacatagccggacgtgtccgtttggcagttcgggatcaagaaccagggcgccgcgtaactgttcgacatggcgaaacactggatggtgaagaccgcctacacaccgcgaatctgcgtaccgcagatgctacggatgtacttatcacagctggtggtgcggaggaggtgttcgaaccacgctttacatatcatggctttcgctacgccgaagtgagcggcatcgatcgcctggatgacattcgtgcgatagtactgcattcggacactccctggaccggcaccttcgagtgcagcgacccggagatcaatcgcttacacgataacatcggctggggacaacgcggaaactttgtgtctgttccgacggattgcccccaacgtgatgaacgacttggttggttagcggacgcccaggtttttttacctactgcgtgttttaatgcggatgttagcgggttcttctccaaatggatgcgtgatgtggtggatgcacagagtccggaaggtggcttttctaacgttgcaccgttgttaagtggtgtcgctgatgaaggcgcaccaggatgggcggacgctggtgtcttggtgccgtggcatctgtatcgcgtctacggggacgatcgttttcttgacgttgatagcatggtgcgatgggtcgacttcgtggcgcgtcataatccggacctgatttggcgtcaccgcaccggcccgcactttgcagactggctagcaccgggacctgccacccctcgtgaagtgctggccacagccttttttcatcgtagtgcggccttaaccgcggaggccgcgagggtacgcggtctgtacggcgaagccgaacgtatgggagccctcgcagatcgcgtgcgcgcagcatttgcagccgcgttcgtaggagatggcgggctagttgaaggagatacccagaccggctatttacttgcactggcgtttggcctgctgacccctgaacaaggtcgcggcgcagcggcgcgattggcggcactcgtggaagaaagcggccctttaacgggctttctgggggtgaacctcttgtgcccggtgttgagtgcgcacggccgtgacgatttggcacatgccctgctgcgtcgcaccgatccgccgtcgtggttataccaagtgcgtcatggtgccactacagtttgggagcgttgggatggagtaggcgccgccagtatgaactcctttaaccactatgcgtttggtagcattggcgaatggttgtactccggagttgccggcattgcccaggccccgggctcggtggcgtttcgcgaagttgtgattcgcccgctgcctggcgaccttagtcgcgcgggcgcgtcctatgagagtgcacgtggcctgatttcagtgagttggcacaacgatgcggaaggcttccgtctacaaacacgtattccgcctggcgcgaccgctaccgtacacttgcctggaggcgaaactcgtcgcgtgacctctggtgatcatatttttgagttagtgcgtggagagaaggcagaaaatttgtatttccagggctcgcatcatcatcaccatcactga

SEQ ID NO: 1157 - DNA, 2652 bp, Artificial Sequence
  6xHis UPI000156F115
atgaataacaaaattaacgatgccacaatgcgtatcaagcagagcatctatatttatgcatttgcggccctgcttctgggcggatgcaaaagcaataacgaattgaccattcccaccaatctgcgaaccgaataccttacagaacctattgggctggacacctcatcacctcgcttcacctgggaatattcgggtaatgaagagggctttaaggccagccgttacgaagtccgtatcggaaccagcccagatgatctgcgtccatacgcggaaggaatggcgctgaaaccgcatacccgatactattggaacgtcaccgtgtgggacggagaaggacgaccgtgcgcgacgtcagagaccgcaagctttgaaaccgcgaagtttgatcctagtgattggtcggctagttggatcaccgaccataaggacaaggagttcgagcccgccccgctgtttcgtaaaagcttcccggtgggcaaagaagtgaaagatgctcgcgtgtacgtagccagcgcgggctatcatgaattgtttataaatggcgagcgcgtgggaaccaactacttggaccctggctatacacattttgataaacgcattctgtatgttacccatgatgtgaccagcctccttaaacagggagataacgcagttgcagcagtgctcggtaatgggtggtacaacgaacagtctgtggcagtttggaacttccatgaagcgcgttggcgtgatagaccgcgtctgctgtgcgaacttcgtattacctataccgacggcacaacggaagttattgggagcgacgaaacgtggaagacgtctacgggcgcgtatacgtacaacaacatctattctggcgataaatttgatgcacgccttgaagaagccggttggaaaactgcccacttcgatgactcgaaatgggaagcagctttgcctgcacaagctccggcaccattgctggttgcccagcagatgccgggcatccgtattacggaagaagtgcggccggttagtatgaaacgctttagcgatcagctatacgtctatagctttccgaaaaacatgtcgggtttgtgtcgccttaaagtgaaaggcgaagcaggaacgcgcattaccctgaagcatggggaactattgaaaaaagatggccgcctagaacagggaaatatcaacgtttattatcatccggttaagcccgacgaagtatttcagatggatgtgtttactctcaaaggcaccggagaagaggagatctttatgcccagtttttcataccacgggtttcagtacgtggaggtagaatcctctcgcccggtcaccctgaccgaggaaaatctgaccggattattcatgcacacggacgtacgcccatcggggtcgtttgcctgtagcaatccactgctgaacaaaatttgggaggcaactatgcaggcgtatcgcagtaatctgcacagcattcccacggactgtccgcagcgcgagaaaaatggttggacagcggatgcgcacattgcgatcgacctcggcctgttaggatttgatggtataaccctgtatgagaaatggatggacgatattattgataatcaacgggaagcgggcgaaatcagtggcattattccgagctcaggctggggttacggagaatggcctggtccggtttgggacgccgtgatgttcatcattccgaatgctctctacgactattacggtgagtctcgctcaatcgaacgcttatacccgacgatgctgcgttacctcgattacctgaagaccaaagagaaagacggctatctgccgttcggcctgggcgattgggtatactggaaagcgaccaccaacaacgagtatacgagcaccgcatattactacctggattataaactgatggcccgctttgcaagcttacttggcaaagacgctgcaccttaccaggagaaggcaaacacccttaaaagtctgatcaatcagaaattctttaatgcagaaacgggggtgtatgccgagggtacacagaccgcccaggccctggcactgtacttaggtttagttccggaagggaaggaacagctcgtagccgataaactccgtgaagtagtggccggcaacaattattttctggattttggcttactcggcagcaagactgtgccggcaatgctgaccaaatacgggtatattgaggatgccatgaagatgattaccaaaaccgaagcacctagctggggatattgggtggaaactatgggatatagcaccctgccggaaacctggacgctgagccctaaatttgcggacgcgtcgttgaaccacgtgttcatgggagacgtaagtgcctggatgatgaatcaacttgccggtattaatcatgatgattctgcaccgggctttcgtcatatccgaattacgccacactttgttaaagagctggattgggccaaaggagaataccatagtgtgcgcggccgaatcgcaagcgaatggaagcgcgaaggcgataaagttatgctgacggtaaccattccggcggattgctcagcggatattgtggttggagaccagaccgaaaccgtaagcgccggaacccatacttttacctatccggccgaaaacctgtattttcagggaagccaccatcatcaccatcactga

SEQ ID NO: 1158 - DNA, 2859 bp, Artificial Sequence
  6xHis UPI0003375A10
atggaaatctataacctgaaaatcaatggaatggtaaatcccattggctttgaatacaaggagatcatttgtagctggaaagttcgaaagaccgaagataagcagcaaaagaaggcgcgtattagcattagtgcggaccaggagttccacgagattgtttttcagattgagggtgaggaactggactcaaccggtactctggccgatttcaaaattaagccctacacgacctactactggaaggtgtacgttgaaggcgaaaatggcgaatacggcacttcagaaacggcgttttttgaaaccgccaaaatgtgccataaatggaaagcagattggattggtaccgataaggaagacacattccacccggtgttccagaaaaaattctatctgcgcgacggtattaaaaaggcacgcctctactgctgtggcctgggtgtgtacgaggggtacattaacggtaagaaagctggcaacgactacttggcaccattcatcaatgattacaaggacaacctgcagtaccagacgtatgatatcaccgatctcctgttccagcagaaagaaaacaaaattgaatttctgttaggtaaaggctggtatattggtaagtttggcctcgatggttgtgagaagatttttggggacgagatgatgctgatcgccgagatccgcgtcgagtacttcgacggccgcattgaagttatctgtacggatgacaactggaaatacaaaggctcggatatcgaagatagcggcatctatttcggggaaaaaatcaaccgtcagctgtgggatgaccgtcagaatctgtggaaacaggcagtcaaaaaaaaacagaagacgccgctgaaagagcgctattctctgccgctgactgtgaaggaagatatagttccggttaaaattattcatacgccgattggtgagacagttctcgacgtgggccaaaacatggtaggctacatggaattcttcgcggatttcccgaaggggacccgtattaaaatcgaatgcggagagattctgcagcatggtaacttctgtcatgacaactacactattgcggagtcaaccttcgaatacattagcgatggccgtaaagaaaccgtacgtccgcattttacttacatgggctttcggtacctgcgtgtaacgggctggcccaacgagattaagctgggggacatcaaatgccgcgttatttatagtgatctgcagcgaaccggattctgcaaaactcagaactcaatgctcaaccagctgtacgaaaattgcatctggtcacagaaaagcaactttgttgatatgccgacggattgtccgcaacgcggtgaacgtttaggttggacgggtgacgctcaggttttcgcggcgaccgcgtgttacaatatggatacccgtgcattctatcgcaaatatctgagagatatccggtcccaccagctccgtaagaacggcgcgattccgaacttcatcccagatttaggcaccttctcagaagcgtgttcgatttggggcgatgcggcaactatcctgccttaccaaatctatcagagctacggttgcgctgaggagattcgttcctactataccaccatgaaagactgggtggagtatatggtgtcaatggatgaaagccagggccgccactacaaatttcagccgggttttcaatttggggattggctggctctggacggcattaccgagcagtctctaaagggctcaaccgacgataactatattggctgttgttattactaccatagcgtgaaaatcaccagcgaaatagcccaagtcctgggttatactgaggatgcccagcggtatcaggaactgagcgggaaaattcgtaaggcgattcttaatgaatacttcacccccaagggccgcctcagcgtcgacacacagactgcatatattattgcccttaagttcggcctgtacaacaataagaatgtgctgatccaacagttcaaggagcgccttacccgcgattgctataaaattaaatgtggcttcgcaggcaccccgcttttatgttccgttctgggcgagaatggaatggaagacatcgcataccgaatccttctgaataaagactatccaggttggctgtattgcgtgaacttaggcgccacaaccgtgtgggaacgttggaatagtgttctcagtgatggcatgctgagcggaacgggtatgaatagcttgaatcattacgcctatggcagtgttgttcagtacttttatgagtatattgcaggcattcgcccgaaacgcccgggcttcaaagaggcctttatcgaaccgaaaccagacattcgcatccagggtgtaatgtgcagctacgacagtgcaatgggcgtttacaagagcgagtggaaaatccaggaaaatggccttatctgcattcatatcgaaatcccgtttaactgcaccgccgatgtcttactgcccgaatactcaagcaacggcctgacttattcggataacgtgaacggcgaaatgatttcggaaaacggcaaattacagctgtgctctgggaaatacgatttcgcatatttccctaaaaatgactatcgtcatgtgtataagccagaatccatcctgggcgatttacgtgaagataaagaagcgctggagattctcgaaaaaaatattccggtgctgtatgaaattatccaatcgaacgacattgagaatatgcttatcactctgcaagaattcgatacgttgcattttatgggtatcgatccggaaatcgcagatgagacgcgtaaaaagatctacaacctgaactactatggtaaggagaacctttacttccagggatcgcatcatcaccatcaccactga

SEQ ID NO: 1159 - DNA, 2316 bp, Artificial Sequence
  6xHis UPI0001A2F0FA
atgcaatacaacgcgtggaaaggcagttggatcactaatactgaggataccactgcaacgaaagcaccgtatttgcgcaagaccttcaccctggataagaaggtcgtgagcgctactgcatacgttgcgggcgtgggctatcatatcgtgttcgtcaacggcaaacctgtcactgatgcggtgttagagcaggcgtacactcgctacgacaaacgtctgttgtataaagtttatgatgtgaccgccttgctgagccgcaaaggtacgcagagcattgccgccgagcttggtaacggctggtacaacatccaatcccacgcagtatggggcttccagaacgccccttggcgtaagaccccgcgtcttttgctggacctagtaatcaggtacgacgatggcaccacggaaacgattgcaaccgacaatagctggaaatgcgccacaggcccgtcacaatttaactgcctgtacagcggtgaaatctacgacgctcgccaggaggtcgccgggtggaaccagacggcattcaatgatgcaggttggaagcaagtgctcctcacctccagcccaggtggtgcgctgcacgagcagatcatgccgtcgattaaggtgattcgtcgtattaagccggtgagtatgaagaacctgggtaacggtaaataccttttcgatatgggacagaactttgcgggagttgcgacactgaatgtgaaagggcaggcaggaaccaaggttactatgtattatggcgaagtcctcaagaacggcgaactcgacatggtgcacaacacggaacacatgcgaagtatgcctggcgaacttcgttttcagacagatgtctactttctgaagggtggggcaagagaggtttttaccccgcgcttcgtgtaccacggatttcagtacgtgcagattgagactgaccaacccttggagctgaacgtccacagcttggaaggacttttttacagtaccgcgtttgaggaagccgggcattttacatcgagcgatccgatgattaacaagctgtatgaagcggcccgccagagctatcgtagcaatttcctgagtattccgaccgactgcccgcagcgtgaaaaaaacggttggactgcggacgcacatattagcaccgagattggtctgtggaattatcagactacagaaggatatcgcaaatggctccatgacgtacgtgatgcccagttgccgtccggggccatgcccggtattgcgccgtcaaatggttggggttatgaccgtcctggaaacgaagaatttacgttcggcccggcatggggttcggcacttggtttcgttacctggtatatgtatctctatcataatgataccgcgctggtgcgtgaacattacgatgcattcaaaaaatatacagatgccgtggcaaaaggcgccgaaggctatctttttaaacacggcctagatgactggatgtccctggtgaaaactcctatgccgttaaccagcactgcctacttttatactgacgccgagttagtagcgaaaatggcccgcgtactgggtaacaaagcggatgagcaaacttatagccgcttagccgattcaatccgggcagcgttcaatcgtacatactttgatgccaatacgggtgtgtacaaagacagcactatgactgcactgagtgccgccgttttccacggactcgcgtcgccggaggctgcagcaaaaaccgcagcacagctgtcgtctaaagtccaacgcagcaattaccatgcagattttggtgttatgggtaccaagtacgtccttccgacgctgtcggattatggttacgcggatgtggcttttcgcatgcttactgatactggctatgcagggtgggcgcactggattgccaacggagcaacgaccttgttcgaagactggcctggagaactaagccacaatcacattttttttggcgactattgcgcgtggtattataaaacacttgcgggtatccgcccagatgaagcagccccgggttttcagcatttctatattcagccagccttcgtgaaagcgctgaattttgtcaaggccgattatgcttcttcggcaggtatgatcaaggtagagtggaaacgcaaaggaaactctatcaagttatccgtcgaaatcccgagccgtgcgaccgttcgtttgccggcgggcatgaccgatgataaaaacgcgacccgcattaccctgaacggtcaacagtttgaccaagtggtgcttaccccgggtaagtatacgtttaacttgaaagaaaacttgtacttccagggctctcatcaccaccaccaccattga

SEQ ID NO: 1160 - DNA, 3177 bp, Artificial Sequence
  6xHis UPI0001BC0C15
atgcaaattgatcggcggcgtgtaatgcttctgggtggtgcaggctcgcttgtagtcgcacaaggcgaagccgcgcctttgggcgccgctgcgatcagcgactgccgcgtgtgcggtctagaaactccgctggcattaggtgcggcaaccccacgcttttcgtggcgtttatcgggaccgcgtcctcaggctgcctaccgtatcaccgtggcccgctctgcagcggatctctctgctccacgagatctggtgtgggatagcggaaaagtggctagcggtcagtccttcgatattgcgtttggtggtcccgcagcagctccccgccaggtcttttggtggagggtggaggcgtgggatgataagggtgcccgcgcggtcggccgtccggcacgttgggagaccgggcttttatcagcgagcgattggaatgcagcgtggttagccgcggaggatgccacagccaaagcggatcgcttagcgggcgtgcattggattagcggcccggaatccattacagacaaaacgtctaagcgttgctaccgcaccagcttcgaagtcccggcccagagcgatgggaccctatttctggcggcgtcgggccttgcaggcgtgtttctgaacggtcaggaactggccgcaggcgaagaagaaccgacccgcttcacaacaatgtctccataccctcttgcactgaggcaaggccgtaacgtaattgcaatcgcgcaaaccccgagccgtgacctcggcggtccgcagccgatgttatgcgcgctaattcgtcttggaggctcagaacgtcggttatcaaccgctgagggctggaagaccaccgttaatgcgcccgaaggatggacactgccggatttcgatgatggcgcgtggccggcagccaccactgctcgtaataggcctaggggacagccattgccgccgggtgcagcaactcatctgcggcgagctttccggctggataaacctgtggcgcaggcacgcctgtatgccacggccctgggcgcatacgaagcgtggattaatggtgctccggcagatgaacggaaaatggcccctgaaccgaccaacctactggaacgcgttttgtatcaggcctatgacgtgaccgcggcattacgcgctggcgataatgtactaggtctgtgggtaggagacgggtggtatgccagcgaatttagtgcaaacgcccgtttctgctttggtcctgcgccatgtagggcaatggcacagctggaaattctgtttattgatggtagccgtcaagtgatcgcaacggacgatcaatggcgcattgcgccgagcgccattcttacgagcgaaatctatgacggggaagtgtatgatgcccgccaagaaattaaagattgggcgctgcctggtactcctcagggaggatggcgacctgcggaaaccgtagaagccccaaatctaccgatcgatccgcaagtaagcccgcctatacgtgtgacccaacgtttgaagccgaaggccgtcacctcacctaaaccgggagttcacgtttttgattttgggcaaaattttgcgggctgggccgaattggcaatctcgggtaaggcaggtacgcgtatcgaactgttgttcggcgagtacctcaaaccagatggccaggtcgatcaggcgaatctgcgtacagcattcgcgcgtgacacttacgtcctgaagggacagggtcgcgaagtgtggtcaccccgttttacttatcatggctttcgctacgtcgaggtcagaggcctggctaatgcccctgccgcagacttgcttaccggcctggttggtcacaatgatattcgggtttccggcgttttacgcgttggtgccccggttgtggaacagttttggaggaatagcgtttggtcgcaaaggtcgaacttctttggtctaccgaccgactgtccccagcgcgatgaacgcctgggctggctaggcgatgcggccgttttttggcctgcggccgcatacaatatggatgtggaagcgttcacccgccgcttcatgggcgatgtccgtcgcgcacaacgccctgatgggcagttcccagattgtattccaccgttcatggtaccttcaagtcgtagtgcaccgggttggagcgacgcaggcgtcattctgccgtataccgcgtggcgtcagtatggggatacaggtgtaattgccgaaaactgggaagcgatggaacggtacttagcgttcatacttgcaaagaatcctgactatctgtggaaaagctctaaaggaaatgattacggtgattggctggccgtggatgcaaaatacttgggcgaagcaacgaccccgaaagatcttatcggcactgcattttgggcagcagatgcagcgatgatgcgtgatatggcaaaagctattgggaaagcggaagccgctgagcgctaccgtgccctgttcgaagcgattcgagctgcgttcgcaggagcctacgtgcaggccgacggcaaaatcggcaacgggtcgcagacctcgtatatcctggcgatcaggtttggcctactgagcccggaacaggctagtgaagcaggtcgtcgattggccgcggatattgcggcacggggcggtaaactgtctaccggattcttaggcacaccgcatatcctggacgcgctggcggataccggtcacgaagctaccgccgttggtttactgctgcaacgcgactatcctagctggggatatatggtgaccaagggcgcaaccacaatgtgggagcgctggaactcagatacgggtgatttgtcaatgaatagctataaccactatgccttcggtgcaatcggtgactttttgtttcgtcgcatcgcaggattggcagctgttgaacctggttttgcgaaagttgttattgcgcctattttcgatcgtcgcctgggatcagccggtgcggattacgattctgttagcggtcgtttatcttcaaactggcgctatgaaggtgacaccgtccgcttggatctgtccattcccccgggcgttcaggctgaagttgtgattccgactgcagctcgtgccgtgcgcgtggatggtcgtccggtgccttctgcccgtttccgtgtagagcgcggtcaacaccgcgtagtgttcacagccgaaaatctgtactttcaggggtctcaccatcaccatcaccattga

SEQ ID NO: 1161 - DNA, 2154 bp, Artificial Sequence
  6xHis UPI00019EF6E1
atgcaacaaagcggcaaggcgtcgtggatctggtatcctggggacctggatatttgggtatcaaacaaaatgcagaaccgtcgcaccgaacgaggcgcgtttcttccaccgttctggaagatggattcgcactacgtgcttgtggaatttcacaaagagttcaatttagcgaacgcagaagaggtcaatctgtacgtggaaggtcagtacaatgtaaaaattgacggccaggccttctcaggctatccgaagaaaatcacggtgccggcgggtaaacacaaacttagcctaaaagtatatggtcaggacaaggtaccagctattttggttcagggcaaaacagtggtatcggacgaatcttggcttgccacgtttgaagacaaagaatggattgatgcgtcaggtaaggcgtcagataagtcgggtacaaccttcgtctcagccgcctcctggaatctgaccgatccgctcagcccgcctagccgtttcaaactggccactaccccgatggccgcggtaaaaaccgataaggttaacaacgggtttgtggcggactttggcaaagagacgttcggatttattaaactgcatggtctgaagggcaagggcaagctgcatatctactacggtgagtcaaaagaggaagcgctcagcgcagatcattgcgaaactctggatcttctcgaaatcgatcttaaagggaaacaggactcggtgatcgaactgtctaaggcctttcgctatgttaattgtcagccggaaggtaatgtgacactggacaaagtgtcgatgctgtatgagtacgccccagttaccgaaaaaggcaacttccgctgctccgatgaacagattaataaaatttacgacattagcaaatatacctttcacctgaacacacgagaatttttcatcgatggtattaaacgcgatcgttgggtgtggagcggcgatgcgtatcaaagctatctgatgaactactattcttttaacgaaagcccgattgttaaaaggactctcctggcgcagcgcggcaaggatcccgtgaccgcgcatatcaacaccatcatggattacagcttttattggtttctgggcatctatgactattaccagtactcaggtgatcagaagttcgtgcaggacatctatcctcgcatgaaaagccttatggactacgtcctgggtcgccgtaacaaagatggcctgctcgaatggatgccgggcgattggatttttattgattgggcggataaactgtccaaagacggcgaagtgagctttgaacagttgctgttttgtcgtagtttagagacgatggctctttgcgcggatatggcgaaagataccgaagctgctgcgaactataaaaaactggcggcggacctgaaggcacgtatctttaaattatactgggacgaaaacaaacatgcactggtacatagccgcatcaacggtaagcctacggataacgttacccgttacgccaacatgtttggcatattcttcgattattttagccccagccaaaaacaggaagttaaacagcatgtcctgatgaataacaagatcaacaaaattacgaccccgtatatgagattctacgaactggaggcgctgtgtgcgatgggtgaacagtcgtacgttctgaaacagatgaaagactattggggcggaatgctggagctgggcgccacctctttttgggaggaatataatcgcgacaaaaaaggcgtggaacatctggcgatgtacgggcgtccattcggtaaaagtttatgccatgcctggggtgcgagtccgatttacttattggggaagtattacctgggggtgaaaccgctgagtgctggttacgagacttacgtggtggaaccttcactgggtggcctggagtggatggaagggaaagtaccgactccctcgggggagatctcgctttattgcagcaaaaaggagattcgcattaaagcggacgaaggctcaggagtgttgcggttcaaaagcgtgtccaaacctgtagttaagggcggcaaagtggtcgaggtgggaaagcgcacttatgagttgaaactaatgaagggcgtgcagtacacggtgaactatcagaaagagaacctttatttccagggttcccatcatcatcatcaccactga

SEQ ID NO: 1162 - DNA, 2355 bp, Artificial Sequence
  6xHis UPI00019EE1A9
atgatcaaccagatcttcaaattctccttttttgcgctgaacctcttggcatggtatagttttaccgctaagagccaagatttgaaggtgttcgataaagcgacgagctggattacttgcgacaaagcgcaagatcagtctaattcgtggatcgcgttccgtaaggtggtgcaattagatgaaaagccggttaaagcgctgctcgacatttcagtggatagcaaatattggttgtatattaacgagaaactagttgtatttgaaggcggcttaaaaagaggccccaacccggacgatacgtactacgacgaggcggatctcaccgaatatctgaaagccggcaccaatacgattgctgtgttactttggtactttgggaagaatggtttttcgcaccacagcagtggtcgcgcgggcatgttctttcagctcgatatggacaagcaaggtaaaatctgcagcgatcgttcgtggaagtgcagcgtcgttccggcgtatttaaacgtttactctggtgaccaacctaactaccgtttagcagagagcaatgtgatctatgacgcccgtctggccctgggggactggactagcgcctcatataatgacaaaacctggcgtaatccgtttgtggtgggcccggcggggtgtatgccgtggaacaagttggtgaagcgtccgattccccagtggaaagattacggcattgtgaacttcaacctgaacttcccgtttaacgccacgggcgacaccatcaaagtgaagctgccttataatgcgcagttcaccccctatctgaaggtggaggcaaccgcaggtaagacaattgaaatgttcaccgacaattattcgggcgggagcgaaaacaatgttcgcgcggaatatatcaccaagaccggcattcaggaatacgagagctttggctggatgaacggacacgttatgatgttcgtcattcccaagggggcgaaggtgctgagtctgggttatcgcgaaacgggctaccatacgacctttgcaggtagcttcaactgcaatgatgccttctataataagctgtgggagaagagttcccgaacactgtacgtgaacatgcgggatagctacatggattgtcccgatcgtgaaagagctcagtggtggggagatgaagtgaccgaaatgacccagtcgttttacgcactggaccccgacgcgaacctactggctaaaaaaggcattgatgaactgactggctggcagcggagcgatggcgtgctgtttagccctattccggcaggaaattttgacctagaattgcccgtgcagatgttaacctctgttggctattacggtttctggacttattactactacactggcgacctcgaaacaattcgtgcggcgtaccctagcatccgaaaatatctctccttgtgggaaatggataaaaacggtcttgtcatttctcgtaccggcggttggaattggggtgactggggcaagaatgtggatatcgatctgatgagcaacgcctggtactatctggcctgtaagggttacctggaaatgtccaagacgttgaaccacgcggaggaaattaaatgggctgagaatcagatgtcagtcatgaaaaaaagtttcgatacccggttctggaccggcaaagcataccgcagcccggattataaaggtcagacagacgaccggtcaaacgcattggcagtcctggccggtttgacggccccggccaagtaccctctactgaaagatgtgttcctgacagaggagcatagtagtccgtatatggagaaatatgtcctagaagcgctgtttaaaatgggttacgccgacattgcgctcgaacgcctcaagaagcgttatacagcgatggtagatagtgagctgacaaccctgtgggaaggttggaaaatcggcgtgaatggttacggagggggctcctataatcacgcatggagtggcggcggtctgatcctcctctcgcgtttcgtggccggtattgaacccgcgtccccgggctacgaaacagttaaaatcgccccgcagatgggctctctgattaattgcagtgcaacggtatcctcggtggcaggactaattgcggtaaaaaacacctttaccaatgaaaaggaatttaaccaattgattgaaagcccgtcgccgctcaagatctatttccctttcgaagtctaccggatcaaaaagattcgcgtgaataacaaaaaactgagcgaggctctgatgctaaaattcaaaaacgagggtaaactggaactgtccaaaggtaaatataagctgacggtcaacatcaacgaaaatctgtactttcagggttcgcatcatcaccaccaccactga

SEQ ID NO: 1163 - DNA, 2502 bp, Artificial Sequence
  6xHis UPI000C8D4928
atgagcctgcatgatcgcagctgggtgtggaatccagattggaacgaaagtcgcaaagagaccagcgccggaggttttgtgcattttcgccgcgaaattgatctggaaaaacgcccgtcccgtccgatttttatttcgattaccgcggacacgcgctacaagctgtacatcaattcgaaattcgtgcaccatggtcctgttaagggtgattcacaggtatggtactatgacgagctggatattcaaccgtatatgaaagccggtaaaaacaccattgcggtccgagtgcttcgcttatatcacggcacccgcttcgggaccagtttcccgcgtatgccgctgggcggtctgcggatccagcatatccgcgatagcaacgatccgcctattattttcagcattgagacgaacggctcttggaaaaccgctgttgaccgttcctctttcctccccattattgaggacgacatgtttctgcatattttcgaagcggtggatcgtcgtaacgattgcaaactgcagtggacgtctgcgaagccacataaaatttttaatgcatttggtctggtaagcccgtggaaattgtcacctcgacaaattccgttcgcaaattttcgcccggccattttttctaccattcataacattcgctccaccagtaatgatgccgaggtggtagactggcaggcttgtctgcttgcgaaatcatccaatcgcactccggtacgtctggcagctggtacgattcaccacgtggaattagaagcatcacaccacttaaccgcgttcatgtcattcctcttcgaacgcccggaaaatccgggagcagagatcaaaattacctatagcgagtgctatgaagatgttccggataatccgcagttccgtcagaaagctgaccggcgtgatacctcaaaaaaactgttgggtccgtacgatacctttattcttggtggtcggatctatgagcaggaggaccctagctccgcttatcatgaaagcggtgaggacatggttatttttgcgccattccactttcgaacctttcggtttatcgcgattgatattgccgtaaactcagatagcgatctgattttccacggtgtgcaaatcacccgcaccaagtatccgttagatgtgcttgcgcagttttccccggggggtcgcgacgtgaccttacctgttcagaaaatgtgggagacctccattcttactctggagaattgtatgcatgattgctatgaggattgtccgttctacgaacaactgcaatatgcgatggacacccgaagttcagcactgtttacttattatctgtcgggcgatgaccgtctagcgcgtcaggccattacccagacgcgtaatagctttcagccgtctattggacttacggcctcaagagcgccttgtgaacacctccagattatcccgaacttctccctgttctggatttgcatggtcgcggaccactacctccactacggagatatggcatttacctcacagttcttgccggtgtgcgatgcagttttggacagcttccgtcgccgtatcgatcctgaccttggcttagtgcgctgctatgatacggacgacttttgggactttgtggattggactgaggcgtggaaacctcgtggcattcccccggccggcaaacgtactggctatcagaccttctcttctagcctgtatgcgtataccttaaatttgattgcgccggctgtagaggagtatggtcgtaaaggcgtagcggaagaataccgccaatcggcggctgaagtagcagcaagcatttggcaacattgtttcgatggccaatatttcacggatgggcttgcgggctccgcactgaactccgaatatagccagcacaaccaggtctgggcaattctgtccggtgcggtgattggagatgaagcacgccagttactgtcaaaaaccttgagtcgccatgatctgacgaccccgtcgattgccatgagcttctacacgctgcaggccgtgagcttggtcggcggcgacttgtatgacctgcattttaatgatttctgggcgccgtggattgagcagctcagcaacaacgtaactacctgggttgaagataatgtgagccagcgttcggaatgtcatgcatgggggagtgcgcccatttatgagttcatggcagaagtcgtcggtctgcgtccgcttgaaccggggtggcgctctatttcatttaaaccgcgcttagcgctattcgaaactatggatagtaaagtgccgattccgattcgcggttctagcggcatggccgtggcccacgtccgctggggacgtaagggggacgatatcgcgggcgtaactattgaactaaagaaaggggcggagaaccttcgcatcccaataaccctgagccacgagagcggcgaagatgaagtggtcatctcaccgtttgcacgcgatgtgcgcatccaggaaaatctgtatttccaggggtcgcatcatcatcaccaccactga

SEQ ID NO: 1164 - DNA, 2433 bp, Artificial Sequence
  6xHis UPI00019BFDCE
atgcgcaaaatcatagcacaggacccgttcacccgtaacgatccgggaattccgtgggatcagcgtggtcagtggccagcgtcatgggttgcggctcgtcgtctgccgagcccgccctatgtggttgcctatcgcctggcgtttgtactgccgcaggctgcgacagccaccctgcatgttaccgccgacgagcgctatgaactgtttctggatagcgaacgtgtaggacgtggctctgaacgtggagatgccgaccattggttttatgaaacgtatgaactggaactgcctgcgggtcctcacacattagtggcccgcgtgtggtcactgggtccattagcgccgtacgctcaacttagcgtgcgccacgggtttctgctcgccgcggaacccccgctgacggaagctcttagtaccggcattgccccctgggaagcaaaaaggcttgaaggttatagctgggtgaacccgagtcctgcgtggggtacgggaggtaacattgccttaagcgccgcgcagtttccttggggtgtagagcgtggtgaaggcgatggttgggaaccggttgaagtggtagaacgcgcggtcgggcgcttgatggcactggaagcccctccgcagcaccttttacgtccggccacgttaccggctatgctggaagttccaattcgtgttggtcgcgtacgacatgttagcgcgccttcctcagaggaagtgagctcattaccgattcgtgcggagcaggctctcgatgaaccggaatggcaggctatgttagagggccgtagctcagtcaccgttcctccgcataccactcgtagggttattattgatttagaagattattactgcgcgtatcctgaactagtaacatcgggcggtgagggtggtgccgtgcgtttacattgggccgaaagtttgtatgaagatggtcgcggccgtcataaaggcgatcgcgacgcaatcgaaggcaaatacttccgaggcgtgggagacgtatttttaccggacggcggcgatagccgtcgatttgatactctctggtggcaggcaggccgttacttggaattgctagtccgcactgcggacagtccactgaccgtggcctcactgcgcttacgcgaaacgcgttatccactggaaatggaaagtgcaattgcgaccggtgacccggatctggacgccacgattccattgatggtacgtgctatgcagatgtgttcacacgaaacctacatggattgcccgtactacgaacagctgatgtatgcgggtgacacccgtcttgaagccttagtaacctatgttatgacccgtgatgatcgcttaccgcgtaaagccctgcgtatgttcgatgcatcacgccttgcctcgggtctgactcaagctcgttacccgagccgtgtgcgccagatcatcgcacccttcgcgctgtggtgggttgcaatggtctgtgattacgcctattggcgaccaggcaccgaatacgtgcgcgaactgatgccgggcgttcgtgcaactatggaggcctttgaacgttggcgcggaagcgacggtcttttggaatcacctgaggggtggaacgtcactgattgggttcctgaatggccggccggtattccgccggaaggggaatgggggcgtagtggcctgctaaactggcatctggcgctagtaacccgtatggtagccgatctggaaagagcgttaggtaatccgcagatggcagagcactttggggcaagagcccgcgaaattgccgatgccgcccttcgtgcattctgggttccgtcccgtggtttgatggccgatgataccgcgtgccagcgtttctctgaacatacccagtgtctggcgattttgtcaggcctcctaccgcctgctattgaagaacaagttggccgctctttattggaagcgcgtgatatcgcgcgcaccacaatttattttagccactatctgtttgaggcctgtcgcaaactggggcgtgtggatgttctgctggcgcgtctgggtttatggcgcgagttggttgataagggcctgcgaacgaccatcgaggcgccggaaccgacgcgcagcgactgtcacgcctggggtgcgcatcccttgtatcatctgtttgcaacctttctgggcatccgtccggcaggtttgggcttttcagcggttgaaattgcaccgcaaccggcggccctgaggcgtctggaaggccggctggtgcatcctcgtggagacgtttgggtggcaatggaagttgatgaagagcagattcgagcacgggtccgtcttccggaagctgtgccgggtgttttttgctggggttcacgacgtgtaccgttacgccctggcgaagaaactgatgtcgttttaccgcgcgcccagggagaaaatctgtactttcagggtagccatcaccatcaccaccattga

SEQ ID NO: 1165 - DNA, 2484 bp, Artificial Sequence
  6xHis UPI000172B62A
atggcgccgttcgtccagcgtagcgcttggatctggagcgccgagggaacgcatgcggctccggcaccggaaagtgcatcgccgagccattaccaggtgcgcctgtttcgccgcgtttttctgctggaaaatggaggacgcgaaggacgtattgcggtttccgcagatagcagatatgtcctctattgcaacggtgccttaattggtcgcggcccggcccgtggtgacgtgcatcatcaattctatgatacttacgaattagcgccgtacttacatcgtggggcaaatgtgctagctgcacttgttctggacatgagtcatgttgcacaccgcccagccgctctgggcgctccggggggtgtcatgacctatgcgggtggctttttattggagggtggtgtggtagaccttaacgatcgcatggaaattttggatacgggggccgcgggctggaaagttaccgttgatcgtagctaccgcttccaaaacgatggcacccgtttcgaaggttaccatggttatttcgaacatcgcgtcagtgcggaagcgccagctgattggactgcggcatcatttgatgattcggcctggccagacgctacggtgctgtaccgcgccgaacgtctagagaatcgccgcgatccggccagcccttatggtcttgtggcccgtatgattccgccgatggaagtgggtcgtgttgcacgctttgcagccggcgttctgccagggggcggcaaacctggagcggaatggaaacgtcttgctgcgggcaaaggtgcggtaaccattccggcgcgtagcactgtccgcattatcctggacgcgggtcgtatgacaacggcgtatccactggtgcaaaccgacgggggtcctggcgcgcatattcggttaacatacgcagaagccctccgtctgccgtggtctaccgtcggtgcgagaatgctgggtcgcccgcaatcattagcgaaccttgcttcacattttgccgacgagtcgagcggttggaccttcgatgctcggggccatgttactggctggtcagaccgatgggaaccggctggccgccctcgcgaagtctttgaaccgtggcactggcgttcattccgtttcgttgaactggaaatcgtgaccgcagaagagcctatggaactaacggatcttggatatcgctttacggcatatccgtaccgtgtggaagcagaatttgcctgcagcgatccgcgccttgaacgcatttggcagactgcccttcataccatgcgcctgtgctctcatgaaacgttcgtggattgtccacactacgaacagatgcagtacgccggagacaccatgatcacaagtaaactggcaatgcttagcacgggtgattatgccttaagccgccaggcgttactccaatttgattggtcacgcattcctgatggtttaacgcagtcacgctacccgtcccgccttttgcaggtgattccgagttggagcctgcattggattacgagcattcgcgattatgcgtgctgctcaggcgatttacagacggtgaacgaagtgcttccaggtgtccgcgtcgttttagattggtatcgccgccatgcagaccctagtgggctgcctagtcgcttaccgtattggaacattacggattggtgcagttggtggccgcgtggtgttgttcctggggcggatgagggtccgacttgtattatttctgcccagttcgtacaggccttagctgaggccgccgacttacacggatgggtcggccaacgtcatgaacagcgtcgtttagccacggaagttaaaacattgcgtggagtgctccgtcgtaggttttggagccgtgatgaaggcctgttcttcgataaaccaggcggtccggaggttagtcagtatggcaacgcgtgggcaattgtgtgtggtgccgcgactgctgctgatcgtaaacgtatgctggctcgttttccggccgatcctctgttagcacccgggagttttttttgctggcacgcggtgttccgtgcgctggaggcggcgggtgcctatgatcgcctgccggagttccttggcccgtggcatgaaatggtggaagccggtcttgacacttttgtggaagaaaacagctactggaggagcctgtgccatgcctggtctgcacatccagcgttggaattcttagcaggcgtgttaggcgtgaaagcgctcgaacccggtttcgcgacagtacgtgtaacccctcaccgctgcggtctgcgtgaagcgcgtggccaggtgtgcaccccacgaggccctattacagtcgcctggacctgggagaaaggtcgcttccgaattcgcgtaacggcaccccgcgagctacaggttgaaattggccttccggatggcagtgatcaccggatgacgcacggccggtttgaaaccgaggtcgtgattcatgaagcagagaatctgtattttcaaggcagccatcatcaccatcaccattga

SEQ ID NO: 1166 - DNA, 2688 bp, Artificial Sequence
  6xHis UPI00019BFABB
atggccgaaccagttgcccctgatggttggacctcaggtggtccgctcgcggttgccaaacttaccgcggagtacgccgaagaacctcatggaacggatgaagtgcgcccgcgtcttgcctggatcgcgacagcgcctggctatggggcaacccaatcagcataccaagttctggtagcttcacagccggagctgttgtcaccggaacaggccgacgtttgggattccggccaggtgggctctgatgccgtccaggtggcttatgatggtccggcattagcagcccgaacccgatatcattgggcggtacgtctctgggatggtcagggtcgcgcgggacgttggagccgcccttcatggttcgaaacagcccttttagatgaaggctttggtgcggcccgctggatcggcgcctcgaccgaggctgccccgttattgcgacgcccttttgaacttaccggccctgtccgtcgtgctcgtctgtatgcaagtggcttggcgtatgcggtactgcgggttaatggccagcaggtcggcgacgcggtgttagacccgggattcacgaactacgatcggaccgtgttatatgtgacccacgacgtaacagaattattacaggctggagaaaacgtgctgggtgcggaactgggccgtggcttttttggcatgaccacgcctaatgtgtggcgttggcatcaggctccgtggacaggtgatccgcgtttactggcgcgccttgtcatcgatcacgaagatgggaccaccacggaattagtttcagatggtagctggcgcgtaaccagcggccctactgtctctgatagcctgtatgcgggtgaacgttacgatgcccgcctggcacaaccgggttgggacgcgcctggttttgacgatgcggcatggagcccagctgtggaactcacggcccctcaaggaacattacgagctcaagcccatgagccgattcgtgttgtcgaagaggttgcaccggtagcgatttcgagtccgcgtgccggcgtccaagtcattgactttggccgcacaacggcgggatgggcgaaattacgtgtggaagcacccgcgggctcccgctttaccctggtttacggagaaaccctcactgccgacggtcaagttgaagcgaccaaccgtcacgtcgatggcgatagatttcagcaggatgagtatgttgccgccggtcatgaaattgagcagtgggaacctcgcttcagttataaaggtttccgctatcttcaggtcaccggcgatgccgaggccgaagtcgtgctgaaagttgtccatagcgatgttcgcgctgcgagtcgtttcgattcagatgtggaagtttacagctggttagagcaggcgatgcgtcgtacggttctcaacaatttgcatggcattccgacagatactccaatttttgagaaaaacggttggacgggtgatgcacaggtgggtgcccccacgatggcgagtctggttgatctggcacgcttctttaccaagtggctggatgacctgcgtgactcgcaattaccggacggtcggttacctgtgattgttccttcagcgggctggggttatgcagaactcgcgcccgccaccgagtggtcaactgtgtacccgttccttttgcgcgaaatgcatcgctggtacggcgatacgcgtgttctcgcagatcactgggatgcggtgcttcgctatcttgactgggaactggaacgcgtagaagacgggctaagcatttctgtgttaggtgattggctgcctccaggctacccggatggcccgccgcccgaagatagccgcttaacggcgaccgcctatctacatcgtgcggtgaccgcggtggtcgagatcggggaactgattggcgaaacaagcgaactggagcgcttacgcaaggcagccgcagaattagccgatggactgaaccgtgaatttttagatcgagaagctggcctgtatcgcactgctgcagatccggattatcgccagacctcgaacgcggtgccgctggcgtttggattagtcccagaggatcaggtgccgcgagtggttgcaaacctggtcgcagatgtgcaggcgcgtgattttcacctgaacaccggatgtttaggtgtaggcgtgctgctcccggtgctgacacagtacgggcatgcagacgttgctgcaaaactcgcacaacagcgtacttacccgagctggggctattggcttgaagaaggtgcagataccttatgggaaatgtgggaagcggacacgcgctcacgtaaccactattttcacggcaccgttgttcagtggcttctagaatcagtggccggcctgcgcaacgtgggaaacggctggcaacgcattgtggtgcgtccggatgcgcgcacgggctcaacctcggccgcactgcgcaccgatacggtacgtggccgtgtggcggcgtcttggcgtctggtgggtcgtgtattacagttagaagttcaagtgcccgttggttgcgttgcagaggtgcacgttccgtcggaagcagcggcggatgttacggctgttccgtcaccctatgctggcgaaccgacccgctcagacggttacaccgtctataccgttccgagcggtcagtggcatttcaccagccgcaccgccgaaaacctctatttccagggatcccatcaccaccaccatcattga

SEQ ID NO: 1167 - DNA, 3108 bp, Artificial Sequence
  6xHis UPI0001B80091
atgtcgcacgaacgagccactgccgaaggcactagcgccgcagcccgtacagcgcaccgcccacacgaaagccctgtacatgggctcacggtggaacatcgtactgatcctttaggcgtagatgcggatcgcccacgtttcggatggcgtacccggtcagcaagccgcggctggcgtcagggaagctatcaaattctggtcgcgacatctccggagcttcttaccccggcatccgccgacgtatgggattccggtcgcgtccgttcagcagattctgtcgcggttcgttatgctggcgttccattgcgcgcctcgactcgttatcactggaccgtacgcgtatggaacactgaaggccgtgcagcgggcacggcctcgccagctgtgttcgagactggtctgatgtccacagatggcgtgggtggctgggatggcgcccgttggatcgggatgaaaggtaaagtacctggtagcccgggtgctccgcttctgcggacacgcgagactttgggctgcggcgatggtcgcactgttggtgatgcgcgtctgtatattagcgctttaggggtgtacgaggcccacgtcaatggggaacgggttacggtgcgtcaggatggcgaacgtaccctcgaactgctgccccctggttggacgaactatgacgcccgcgtggattacctgacctacgatgtgacggtgctgttagcagacggacccgaagtgacgttggcggtagttttaggaaatggttggtataacggtcgtgtgtcggaaggctcgacataccatacgcagtcaggcaacgcgctggcggtcaaagcgaaacttcttattcgctacacggatggcaccacgcgttcagtcgtaacgggtacctccggcggttggaaggccaccgatacgggtccgtttcgtgcagatgatttgtacgatggtcaaacgtatgacgcgcgtcgcgaactaccgggatggacagcgccgggatttgacgacacggcctggagcgatgtagaacacatcgcatttgaagatcggtatcccggtgttcgattacgtgcatatcctggcgaaagtgcacggtttgtagatcgctgggaccgtcgaccacaaagcgtgaccgtaatcaccggcgtgacaggccaggatggctcaccacatgggcgtggtcgagtcgtagttgatccggctcggaccgtaactgatcccgctaaagcagcgactgcgcaagttaccctagctgcgggagaaaccgcagtttttgacttaggtcagaatatggtaggtgttcctcgatacggtgtccgtggtccggcaggtgcgcgtgtggaattccgttttgcggagattttgaacgatgacagcgcgggggcggatggccctgaaggtagcctgtatcgcgccaatttacgctccgccaaagcaaccagcacgtacattttaaaaggtgatcctgagggtgagacccaccaggattcattaaccttctacggcttccgtcatgtttctgtaacggcgtcagaaactgttacagttaccggcttaactggccgtgtggccacgagcgctgttcgagaaacgggaaccgtcacgactaacgatccgcacgtcgataagctagcgtcaaacatccgatggggtcaacgcggcaactacttgtgggtaccaactgattgtcctcagcgtgatgaacgacttgggtggacgggtgatacccaggtgtttgccgtgactggcctatataacgccgacgcatatacctttctttcgcatttccaggacacggttgtggattcacaggccatttacggcgcggatggggcacagtatacgggagttgccccaggcggtcgttataacttcccgggcggcggaagcggttgggccgattgcggcgtggtactcccctggactctttggcagatgaccggtgacactaccgtcgtggaagataattggccaagtatggtacgttatctagattggatacgacgtcaaaccggcgatacctatgcaggccaagggtcgctgactggcgactggctggcaccccaaaaaacctcagcgcagttaatgagcgatgcgtattacggctacagcgcccacttaatggcccgtatggcgcgtgcgattgggcgcgcggaggaggcggccacctacgaacgcctgtttggtcgtatacgtcaggcgtttatcgcgcgctatttaagtacggaagggggccgtgtgaccgtgagatcaggtctaggggatgcttctccaattgagccaggcagtgatccaaacgagaaaactgaagacaacagccagtctgcactgttatgggtcttaaagctcggcttctacgaaaatgaagctcagcgtcgcgcgctggtggccctgttggccgacgatattcgcaatgatgccgcacataaagaggcgcaccctgactcagtacgtgttcgttacccggaaaacacactgagtgtgggatttctgggggttaatatcttggcccctgttctgactgatgagggacgagctgatttagcctacgagttgctgcaccaagatgccttaccgagttggttgttcagcgttaaaaatggcgctacaaccgtgtgggagcgctggaacagttgggcggaagatgccggcttcggacctgtgggcatgaatagctttaaccactacgcttacggcgcgatcatggaatggatgtatgcgtatatggccggtattgcacgcgatccggatgcgccgggctttaaacgctttctactgcagccgcacttagaccccacgggtcgcattacacgagtgcgggctactcacgaatctccgtatggtgaaatcctgtcggcgtgggaagtgggcagcggtggtcgccgtctggcgtatgacgtggccgtccctgccaattcagaggctacccttcgcgtcccggcagtgtcagccgatagcgtccgcgaaggcggaacccctctggcggatgtagcaggcgtgcgtttcttaggccacacagaaggtgtttcgagttacttactgccgtcgggccgttaccgtctctccgccgatctcagagaaaacctgtacttccagggctcccatcaccaccatcatcactga

SEQ ID NO: 1168 - DNA, 3537 bp, Artificial Sequence
  6xHis UPI00023EC5D1
atggagccggccgttacgttagacggggcacattggatctggtatccggagggagatcccgctactagcgcccctgccgcaacacgctatctgagacgcgcattcaccgtggctgcttcggacatcgcgacagcccagctggtggtcacgggtgatgatacgattgacgtatgggtcaatggagttcgcttggcggggtcgcctcgtgcggctgatagttggaaaagggcggtgcgagtcgatctggcgggctctctgcatcccggttcgaacaccgtagctctggctgctcgaaatacaggtggtcctgctggtgtattgggacgtctgcacgcgggttcagtagacctggtaactgacggttcgtggcgtgctgccaccggcgtgccagaaaactgggcagatccggcgtttagcgatgtcgcgtggaccaccgccaaagacctcggcgcgtatggcggaggtccgtggggcgcaggagtggcactgccggacccagcggctgccagcccggttagcgtgaccgatttaaccgttaatcgccaagccgacccggtgggtgtagatacccctcgttttggttggcgcctcgcagcaggtaccggcggacagatgcaaggacgttatcagctgaccgttggttcgaccgcgggtgccgctgacgtttgggatagcggtattgtggcctctaccgcgtcacgtgatattgggtacagcggtccggctttaggagctaatcgtacctatttttggagggttcgagtgtgggacgctcagggccgcccgagcgcgtggtctgcaggtgcacgctttgacaccggtattgcactgaccgctgccttcgtaggagcacctcctgccggtgatctgtccggggcggactggatttggtatcctgaaggtgatccagctacttcagcaccggcagcgacgcgctattttcgacggaccgtgacgctcgctacgagcactactctggttgtagccggcgatgataccgccgatgtgtgggtggacggcacgcagatcagtgcatctccgcgtgttactgacagctggaaaacggcggcaaccgtaaccgtgccggctggtacacgcaccatcgcgattgcggcgtccaatacgacagttggtccggccggggtaattgccaagttaggtggcatcgttacggatggaagctggcgaagtgcgactgcagcgcccggcggttggcagcaaccaggatttgacgacagcggctggctggcggctaaggttctggcggcctacggctccggcccttggggcggtcaggtgcttgttccagctgccgcaccgtatcttcgtaagggtttcgccgtgaccaggccggttgcacgcgcgcgactctttgcgacagctctgggcctgcatgatacatacctgaacggcgcccgcgtgggaactgaacgtttagcaccaggctggacagattatacgaaacgcgttcagtatcgaggctacgatgtaacagcggcgctgcgtctcggcgataatgcattggccgcacaaattggccatggctggtatagtggcaatattggcttcgcgggctcacgtcgctacggaacccaaccgtggtacgcggctcagctgattattgaatataccgatggtacatccgcgaccgttcagacagatggtagttggagaaccgcaccgggcaatattctgggagatgatctttacgcgggggagacccaggacgcccgcttaattcgcagcgggtggaatacggcgggttttgatgattcagattgggttccagttacggttcaaaacggtgcgcgccctactttggtcccgcaggttgatccgggcgtcaccgttcaacaggaactgcgtccggttgcagtcactcaacctaagccgggggtttttattgctgatctgggccagaactttaccggttgggaccgcctccgtgtttccggtccggccggcacgaccgtgactttgcgacatggtgaaattttaaacgcggatgggaccttatacacggcaaatttacgtgcggcgcaagccaccgatcgttttactcttgccgggaccgggacggaaaccttcgagccgcgctttaccgtgcacggctatcgttatgttgaaatcacgggttttcccggtacccctgacgccgattccttaactggcttggctgcatggactggcggggccgccacgggtatgtttactagcagtgacagcaccctcaaccaggtgcagagggccattctgtggggggcacgctctaacctgctctcaattccaaccgattgcccacaacgtgacgaacgtctgggttggacgggagatattgccgcctttgtcgcgacttcaacgtttaactttgatacgtacggtctccttgccaaatttgcaactgatttaacagacgcacaacatagtgacggcgctttcacggatgtggcgccggatgtactcggaggcgcaggcaaagccggctggggcgatgccggggtcattgttccttacaccgtgtggcagcgttttggcgacctagcaccggcggatcgtaactttgctgcgatggcgcgctgggtggactacctacgctcaacagctggtgcagacctcatccgcaatcaggatacgtatggcgattggctgaacgtggatgatggcacgggcaacgatctgacctcgactgcattttttggctggagcgcccgtctcgttagccgtatggccgccgcgacaggccgcacggcgcaggcagccacctatggtactttggccgatcagatcgccgcagccttcaccgggcgcttcgttcacgccgacaacactgttggtacgggcagcgaaacgggctatgttctggcactggcgtttggtttagttcccggcgatcgcgtgcaagcggtagccgatcgtctcgcggccaaagttgcgtcgcgcaacggccatcttagcgtgggcttcatgggggttgaaaatctgctgcctgttctggcagaccatgggcatgcagatgttgcctatcgcattctacagcagccggactacccgggctgggggtacatgattgcacgtggcgcgaccacgatctgggaacgttgggatggcattcgtccggatggctcgctgcaggacccgggtatgaattcttttaatcactacggtctgggctctgtgggcgactggctttatcgcgaggtaggcggcgtggccccggctgcaccgggttacgcccaggtgctgttagcacccaaaccgggtggctccctcaccagcgccagcgccgaactaaccacgacatttggccgtgtgcgttctgcctggagtcgttcgggaagcgcggtcacattacaagtggtagtggccacgggcacaactgcgactgtgcgcgtgccgggcacggcggtaacaagtgcgcccgcagaagctgttccggttggtggtacgagctatgtcgtgggcgcgggtagctataccttcacatctacattagagaatctgtacttccaggggagtcatcaccaccaccatcattga

SEQ ID NO: 1169 - DNA, 3231 bp, Artificial Sequence
  6xHis UPI0003C3CD2B
atgactcgtctgaatcgtcgtcacttcctggccgcctcgggcctggcggcaaccgtggcacccaccatgtcacgctctaaaaccttagcgaaaaccgccctgggtgtcactgatttacgcgccgagcagagtgaaaacctgctgggcacccaggctcgtgaaccgcgcctgagctggcgtctgacaggtactgaaaggggtatcatgcaggcgggttaccgtctgcgtgccggctcaaagccgggcaccgcggatttgtgggactcaggtaacattgcgtccgacgcgtgtttcgacattccgtataaaggcaaacctctgaacgcgatgcagcgtgtgtggtggaccgtagaagtgcgcgatgcgaaaggccgcaccgctacgtcagcacccgcgtggttcgaaaccggccttcttgcgcccggtgattggaaggcacagtggattgtcgctgaagatgcgctcgcggaaggcgatcgtaaagcaggtctgcaatggatctggtccgagaaggcgctcgataaccgtttgcatgcgttccgcttggattttgatgtgccggcgaaccttgcgagcagtgaagtgcttatcgccggcaaagactggattcgcggcgtgtgggcgaacggcgaacagctgcctacccctgatcagttagtcccaaattggggcacgttagttccggttccagcaaaattaaaaccgggcaaaaactcagtgtgcgttcttgtccaggcagaaaccaccggattctttccggtagatggcggtgccttcgccgctctgattcggttacgccttagtgatgggacaatcaaacgtctggtgagcgacaccaactggaaagtccgcccattacctcctgaagcgtggacaactgcagatttcgacgcatctggctgggtgcgcgcccaaaaaagtggcgcggatgcgcagaacgatccgcgtccggcggaacctgcgatgctcctacgaaaagcattcacccctgctaaaaaagtggtgaacgcacgcctgtacgcgaccgcccttggtgcctacgaagctcgcctgaatggtcagccggtgtcaactgcaaaaatggccccggaaatttcagtgacaaaagaccacatctattaccagacttatgatgtaacgaagctcattcgagcaggtgacaacgctcttggggtggttatgggggatggtttctacgcctcagcctttggctggcggctggaacgctatggcttcggccccgcccctcgcaggctgttggcgcagctacgactggactatgcggatggtacgagcgaatggattgtgaccgacgacagctggcgcattggccagtctcctatcgtgacaagcgagatttatgacggcgaggtatttgatgctcggttgaaaacggacggttgggataaaacgggcttcaacgcggcccgttggcctgcagttcgcctgggtcaggcacctcataccaagattgttgcgcagacagggccgttgctggtgcccgtttccaaacgacgcggaactatcacgcaaccgaagcctgggatctatgtcattgattttggccagaacttcgctgggtgggcgcgtctaaacgtaaaagggacctcagggcatacggtgaccctgaaattcgccgaatatttaaaggccgacggagaagtggaccaagctaatctgcgaatggccaaatgccgtgatatctatactctgcgcggggacgcaggcggcgaaaccttcgaacctagcttcacctaccacggtttccgttacgtgcaggtggaaaacttcccaggtgttccgacgcccgcagacattgagggtatcgtcgtgacgtcatactgccgcgagaccggtcgtatgacctttgacgatcctattattcagaaattttggcaaaactccgtgtggtcacagcgttctaacttttttatggtgccgactgattgcccacagcgtgatgaacgcatgggctggatgggagacattcaagtgttccttgatgcggcaacgttcaacatggaatgcgatccgtttattcgtcgctatttagacgaagtccgtgcaagccagacagccgagggcgcgttcccgattgtgtgcccgcaacccgaatcgttccctgaagttacaaccgccggctggtcagaggcgggtgtcattctgccgtggacattatggcgccgttatggtgataccgcagtgattgatgagaattgggtagccatgacaaaatggatggactacctctttaagtataacccggactacgtatggcgaaaagaacgcggtttagatttgggggattggctgtcagtggatgcagtcaaacccgatgacgaaactaccccgcgtattctgtgcgctactggttactgggcgtattgcgcagatctgatgactcaaatggcggcggcgactggccgagaggcggaggcagccaaataccgagaagtacgagcaaaaataggcgccgcatttgccaaagaattcgtggataaagacggcaaggcgggcaacggttcacagactagccagatcttagcgctgtatttcaacctggtcccggccgagcgtagggcggccgctggcgaaattctcgcaaaagaaattcgaggccgtggtatgaaactgtcgaccggctttctgggaactccgtacttactagatgtattagcggataccggccacctggaagaagtgagcgggctacttaaacaacgcgagaaaccgagctggggctatatgccgttaaagggcgcaacaactatgtgggaacgctgggatggcgatactggggatcttgcgatgaacagctataatcactacgcatatggcgcggtctgcggatttatgtatcgccgtctggcgggactggcgccggcggcaccgggttttcgtaaaatgaccgtggagccgatttaccttcctcacgtcggcaaagtaacagcgaactacgaaagctgcctaggtaccatggcgggcgcagtgacgggcaatgcctcaggcctcaaaacctatgatcttaccgtacctccgaatgcggtggcggaagtgattctgccggatggtgcgtggcgggaaggcggcaaagccttaacgggtcatgccgacattcgtgcgctgcgccgcgacagtgggaaagttcgttttgaagtgggcagcggttcctatcgattcaaaattgagaatctgtatttccagggtagtcaccatcatcatcatcattga

SEQ ID NO: 1170 - DNA, 3168 bp, Artificial Sequence
  6xHis UPI00019BF65D
atgtcaccgccggctactcgcgaaaccttacaggttcgcaaccttaaaaccaacaatctcacgaatccgctgggtgtcccgggaaccccgccgcgtctgtcatggcaactagatggcgatcggaggggcattacccagagccgttatcaaattcgtgtggcgagcactccggctaaaaccgctcgtccagatatttgggatagcggtgttgtgcgatcaacggatagtatcgaggtgccttatggtggacccgcactgaccacgggtacagcttatcattggacggtgcgcgtgtgggatgatgcgggtaaagcatccgcatggagcccagtggccactttcgagactggccccttacgcccaggcgattggcagggagattggattggcgcagataaccaacccggtccagaatggaccgatacgactattgatgccgacgtgaccttagtgaaagacgccctgggtgtgttttttcgtggtcggggaggcgttggctacatgtggcagctgaaccagctgacccccgataaaccgctgttacgtccacatgtccgtcaaccaggaggtggctatgtactgctgggtgaaattcctctcgccgcgggcacggacctgaaacagcgccatcacctgcgaattacggttgcgggtcgtaccattacgacctggctggatggtgtgcaagtggatagccgagagcgtagcgatcataatgcgccaggcgttgttggatttcgtactgatggtgccgaacatggcgtggtgcacagcctgaaagtgacaaacgtagcgggcgaagttttagtcgacacggcctttcccgccggcgatcagacgtttcctgatggcacagtgcgtgctgaggggggactgcaggtaaaaggtaccacagatttatggctgccagggaaacccatcccggtgttccgcaaggcaatttccttacccaaagccaaaaaagtagcgagcgcccgtattgacgctgccgcgcagggcatttatgaattgacagtgaacgggcgtaaggcgggtgatcatcaactggcgcctggatggacggattatgcgcgtcgcatccagtcgcagacctatgatgtgacaaaactgctgaaaagcggtgcaaatactctcggagcggaagtcgcgcctggttggtttaccggcaatctggcaatgttcggcccgaataaatacgggacggataccgcgttcatagcacagctccgagttacctatacggatggcaccgccgacgtctttgccaccgattctagctggcaaactgcccctggggcggtccgtgtcgcagatctcttgaacggcgaatcctatgacgctcgccgcaccgctagtgagtgggtgcccgcccaggtacgtccgtccgcaacagcaaagattgtcccgcaaacagatcagccggttcgtgtaacccaggagctgaaagcgcgagccattccatctccgacgccgggggcctacttatatgatcttggtcagaacatggtaggtatcgcacgcttgaccttgcacggccgaccaggacagaccgtcaaaattcgctatggtgaagttttaaaccccgatggcactctgtacacggataatcttcgctcggcgaaagcgaccgatcactacacattcgccacgagtcgcccggaaacgtatcaaccgcgcttcacctttcatggctttagatatgttgaagtatcaggtttgcctaccgcgccgccagcgagtgcgattgtgggtgtggtactgggtaccgacgcggaacaggtcaacgaatttcggaccaacagcccactggtaaatcaactgcacagtaacatcgtctggggtcaacggggtaatttcctgagcattccgaccgacaccccggctcgcgatgaacggatgggctggacaggggatattaacgtttttgcccgtaccgcagtgtataacctcgacagtcaggcctttcttactaagtggttgcaggatcttcgcgacactcagagggcggatggcgcgtatgcgagcgtggctccgactgtacccaactcattcgacggaggcatgggaaatgctggctgggcggacgctggagtgaatgtgccgtggaccttgtggcaggcgtacggcgatacaagtgtgatccgtcaacattacgcgtctatgacgcgttatgtggattacttagtcgcgtcttctaatggactgatccgtggtggcggagactatggcgactggctaaatctggatgatcctacccctggtgaactcatcggtacttcgttcgtcgctaaaggggcacgccagctgtcccagatggcggctgcaattggccacactgccgacgccgcgaaatatcagcgtgtgtatgaagatgtccgcgcggccttcgcagcgcgctttgttgcggctgatggcaaagttggctctgattcacaaaccggttacattcttgcgttcacttccgatctcgtgccagccgatcgtattgcggcggcgggagaacacttcgcagccacaattctacgtcgtgatacccatttgagcacgggtttcttgggtgttgatggtctgttaccagttttaaccaaaattggccggactgatctggcgtatcgcttgttgcagaacacatcgtatccgagttggggctatgaaattggcaaaggagcgactacgatttgggaacgttggaattcgattaatccggacggcaccttcaatgatgtaggcatgaactcttttaatcactatgcgtacggtgcggttggagaatggatgtatcgtacactggcaggcttaagcgcagccgaacctggttatcgtaaggcgcttattgcaccgaccccgggcgatgggattgatacagcccagcttcgtcaccgtaccccatacggtgaagtcggaagccagtggcgccgtctggccgacggccgtttcaccctggaggtcgaagtgccggcgaataccaccgcaactgttcgcctgccggccgcggaggccagacagattaccgaatcgggccgcgcactatcgcgtgcggtgggtgtcagcggcgtggttgatgaaggcaccaccgtcgcacttaccgtgggctccggcaattatcgttttgcagtgcgtccggaaaatttatactttcaaggcagtcatcaccatcaccatcattga

SEQ ID NO: 1171 - DNA, 2913 bp, Artificial Sequence
  6xHis UPI00000BC760
atggcaggtcgtaactggaatgcctcgtggatctggggtgggcaggaagaatcgccgcgtaacgagtggcgttgttttcgtgggtcttttgatgcccctgcgtccgtagaaggtcctgcgatgctgcacattaccgcagattcacgctatgtactgtttgtgaatggcgaacaagtgggccgtggccctgttcgtagctggccgaaggaacagttctacgatagctatgacattggcggccaactccgtccaggtgtccgcaacaccattgccgttctggtacttcattttggcgtgagcaatttttactatctacgtggcaggggtggcctgattgcagaaattgaagctgatggccgcactctggcagctactgatgcggcctggcgtacggaacgtttagggggccagcgcagtaacagcccccgcatggcctgtcagcagggctttggagaagtcatcgacgcgcgagaacttgcggaagattgggcattaccggcatttgacgatggcggctgggcccaggcaagaagcataggcccggccggtaccgccccctggacaagtctggttccgcgtgatattccgtttttgaccgaagaaaaattgtaccctgcatccattcaaagcctgtcacgtgttaaagccccaaagtatgcggcggccttggatctgcgcaaccaaatggtgcctgaatctgttaaccacgcgaaccccgtgtcgtactgtggctatgttgccaccattctgacgctggaaacttcgggagtagtcacactcggattccccacgggtgtgcgtggcagcggtgtgtgggtggatggagtgctgcagacggaatggacaggggtgcagcctgaacgctactattcactcaacctggccgccggtgaacaccttgtattggtggatattacgtcgagcgatcacggcggcagctctcacttcgcgatcgatagtgaagcggcatttacattgcgctcgccggcgggcgacaacggggttcctctagcgactatcggtaccttcgatcagagcgaatacattgatcatcgcccgggtcgtcgtatgcaaaccgatcatccggattatcgtgcactgccagaagcggccccaaccgcggccgcgctggaggcatttgcaagctgggtgaaaccgtttgaaccgagcctctatacggaggaaaatgtgttcggttctaacgtttggcgtaccctggcagagcgtcgtgcggtacctcgttcggtgcttaatgcaatccttccggttccggagcccggtgttttgccggtgtttgaggatggcgattgtgagctggttattgatcttggcgcagaacgatcaggcttcattggatttgaattggaagcaccggcaggcactattatcgacgcctacggtgtagaatacatgcgcgaaggctacacgcagcacacctatggcttagataataccttccgttacatttgtcgtgaaggtcgtcagagttatgttagcccggtccgtcgcggctttcgatatctgtttctgactgtgcgcggtaatagcgcgccagtgaaattgcacgaaatctacatacgccagagtacgtacccagtggcggaacaaggcagcttccggtgtagcgatgcattgctgaatgcgacctgggagattagccgacatactacccgcctgtgcatggaggatacctttgtggattgcccgtcatacgagcaggtattttgggttggtgatagtcgcaacgaagcgctggtgaactactatgtattcggggaaacggagattgtggagcggtgtctgaacctggtgccgggaagtgccgatgaaacccccctttatctggatcaagtgccaagcgcctggagttcggttatcccgaactggaccttcttctggattcttgcgtgccgtgaatatgcggcacatacgggtaatgaagcgtttgcagcacgtatttggccggcggtgaaacatacgttaactcattaccttgaacatattgatgattcgggtctgctaaacatggcgggctggaatctgcttgattgggcgccgattgaccagccgaacgaaggcattgttacgcaccagaatctctttcttgtcaaggccttacgcgactcgcgtgccctcgcggccgcagcaggcgcaacggaagaggcggatgcattcgcagcaagggcggatctgctggccgagaccattaacgctgttttatgggatgaagaaaagcgcgcgtacattgactgcattcatgcggatggacgccgttctgatgtgtactcaatgcaaactcaggttgttgcgtatctatgcggtgtggcacaaggagagcgcgaagcggtgatagagggatacctgtcttcgccgccgccggcttttgtccaaattggctctccgttcatgtcctttttctactacgaggctctcgaaaaagcaggccgccaaaccctgatgctcgacgatattcgccgcaactacggccagatgcttaggtacgacgccacaacgtgttgggagatgtatccaaacttcgcggaaaatcgtagcaacccagacatgctgacgcgctcacactgtcatgcttggagtgccgcgccaggttactttctgggcagctcaattttaggagtgaaacgcggtgccgatgggtggcgcacggttgatattgcacctcagccatgtgacttgacgtgggcagaaggcgttgtgcctctgcctcagggaggtcatatcgccgtcagttgggagtttgtgagcgcgggtaagttgaaattacgcattgaagcgccggaggacattgaagtaaacgtaaccttaccggagggaattgaaggcgaggtcacccaagtaaaatatatgtcagaaaatctgtactttcagggcagccatcatcaccaccatcactga

SEQ ID NO: 1172 - DNA, 3432 bp, Artificial Sequence
  6xHis UPI00006E5FAB
atgtttcagaagaaacacctgttcttcattctgctgctggcgtccattgtctctgcccaagaagtacataagaaggaaaccaatttccaacccaccttagagtctagcaagccctgggtctactggtattggatgaagagcgcttattcgaaacctggaattacggcagatctggaagccatgaagcaggctggcattgctggggcctacctgatgaccattaagggtccagccaacccgccgttaatcgaccctcctgtgcttcagctgactccggagttttgggatatgattcattgggcgttcaaagaagcagatcgccttggtctgaaattagcgtttcatggcgcggatggctttgctgttgcggggggcccctggatcactccggaaatgagcatgcaaaaaattgtgtggtcaaccaccgaaattctgggcggcaaaaaggtcacctccaagttaccagtcccggcgcattacaaagattactacaagaatattgcaaccttcgcgatccccattaaagagtacgaaattacgagccagatgcagctgccgaaggtgacgacatcgaacaatacagacgcgtccttcctggcggatcccaaaaaagacgaaaactttaaatttgcggacgcagggtggattcagtatgaattcgcccagccgtttacctgcaaaagcatcgtgatcgaaaccaagggtcgtgattttcaggcgcaacgtttaattgttgaagtgagcgatgatggcgtcaactttcgattccatgaacggatgattgcacctcgtcatggctggcaggacatggactttccgaacacccacaccattacaccagtgaccgcgaaatacttcagatttgtatgcgatcctaaaggcaccgaaccgggcgcagaagacttagacttcgccaagtggaaacagaacttgaaagtgtctaaaatcacactgtcaaaccaaagcctaattaataactatgaaggtaaatcgggcgcgatttggcgtctgacgccgcagaccaccgaaaaagaaattcccaatagcgacgcttttaaaaaatcggaaatcatcaatatcagcaactttgtagacgctgatggcaacctcaattggaaagcacctaaaggtaagtggaaaatcctgcgtatgggccatacctcgactggccacgaaaatgcgactggcggtgccgggaaaggtttggaagttgataaattcaacccggaattaattcgttttcaattagaccattggtttggcgaggccgtccgttccgcaggcccggagctgacgagcaaagttctagaaatcctacacttcgatagctgggaatgcggctcccagaactggtcatcggtattccagaccgagttcaaaaagcgccgaggctacgatttggtggagtacctgccggttatggccggtatccctgtagaatcagccgattttagcgaaaaggtgttatacgatatccgcaaaactatcgcagatctagtggcggataatttttacggtaccatcgcccaaattgccaaagaatacaacgttaagctgtccgccgaaaacgtagcgcccgtggttactagtgatgcactcctccattataaatacgtggactatccgtccggcgaattttggttaaagagccctactcatgataaaccgttcgacatggttgatgcgatttctgggggccatatctacggtaaggatataatccaggcagaatccttcaccgcgctaaggatggattgggacgagcatccgggtaacctgaaaaccaccgcggatcgtaattacgcgttggggattaatcgcctgttctaccacgtgttcgtgcacaacccatggaccgatcgtaaaccaggtatgaccctagatgacatcggtacgtttttccaacgcgatcagacctggtggaagcccggtaaagcgtggttcgactattgccagcgcgtgcagttccagctgcagaaaggaaagcccattattgatctggctgtattctcgggggaagatttcccgagccgcagtttcgtgccagaccgcctggtgccattcataccgaatgtgtttggaaaagaacgtctggaaagtgaaaaaatccgtctagagaacgagggccagccgactgcaaagatgcctaaagaagttacctatagtaagaacattaccgacctgtctcaatggattaacccgctgaacggctatcagtacgatagcttcaatgccgacgttctgattaaccgcgcaaaagttatcaatggtaaaatctcctttgagggtgggatcgagtacggggcgttgttctttccgggctcgcacaaaatggcgccaaacaaaatgttaagtttagcgagcgcggaaaaaattctccagttactgaaagacggcgcgaccatttttgtcgacgagaaaccgaatctgcagcctggtgtgcaaagcgaggcggatcagaagaagtggcagaacgtcattgacgagatttggaacaacacgaatagtgcgacatggaagattggcaaaggaaccgtgattaagcttccgtacttaggcaacgattttgccagcattggcatctcgcaggacgtgtattttaccaatctgaaccgcgtggatagcgaaacgctggcatgggcgcatcgcaagtcggataccgaagatatttacttcatatctaaccagaaagccgagaaacgtacatttgatgcctccttccgcatcctaggcaaagtgccgcagtggtataatccggtgactgataaaacctccgcactggataattggaagatagagaacggccgcaccattgttagcattaccctcgacgcgaacgagtcggggtttgttatgtttaaggaggagaccaaagagattcttgcaaaaggccgtagttcagagtttgaaaaagttcagacgctagacgagaactggaaactgcagtttgatactgagtttaaaggcccgaaagaagtggtgaaaattaacaaattattcgactggagcacctctgagaatgatcaaattaaatattactcgggaacggtcgtgtataaaaaggagttcatttggaagggtaaagattctagcaaaacgtggctggatctgggcgagattagcaacatcgccgagattaaaatcaacggaaaggactgcggagccctgtggacttttcctttcaaaaccgacatttcgaaagccctacagaagggaaaaaacacgattgaaattaaggttacgaatacctgggccaaccgcttaattggcgaccagaagttgccgaaggaagaacgcttaacctggaccaccgccccgtttcggttagagggtgaacctctgctgaaggcgggtctgctgggacccgttatcatcgttaaggaaaaagagaacctttacttccagggttctcatcatcatcaccatcattga

SEQ ID NO: 1173 - DNA, 3582 bp, Artificial Sequence
  6xHis UPI00032EEB9C
atgcaaagtaccttcagtctgcaaaaactgaaagtagatcaccaggaaaatcctttgggtattgaaaccgcctctccggtgttttcgtggcagatgcaggtggcaggaagcgaacgaggtgtttaccagaaagcctatcggattcaggtaagcgattcgcatggagctttgatttgggatagccaacaggtgagctcggatcgtagtgttggcattcgatatcagggcgaaaagctacgacctatcaccgcgtacacttggagcctgaccgtttggaaccagtcggaccattctcagaccgaaatcggcaagttcgaaaccggctggatggactcaccgaatgcgtggaaaaacgcggagtggatcgggggtgattcagaggatcttgtgctgtacgcacatgccctcgccgtttttaaagctggtgtgactatccagcttgatcaggaatcgaaatcaacccgcgctgcgttcctgctgggaggcaacgatgtgcgattaatgaaaaaaaacctgaacattcttcagatggagtcgggtcgtgatggtagctatgttgggtttgaattagatatctcacaagtgaatggtaccgaagaaggtttagctctgttacatgcctatcgcgttggttaccacgccgacgatcaagttggtaccccgtttcactctatgccgattccgcagcgtctgatacacgaagggaataaatatgaaccgcacgacctgtttttggaatgcaacctcggtatttttcaggtgtatctgaacggaaccgaaaatgaaaataagatcagcccgaacgacccgagcaaaccgagctatgtcgcgcaaggtctaaacctaaatccgatgggagaagggggtaactatatcaacttcccacttctgggcgacataggcttcaaaactgattccggtcaactggccacattcagtaacctcaccatttctaattaccggcgcccggggaatgtgctgttctctgaagccgaatcgacgatttctatttttgataaacacccgaacattcgcgccatcgcgggtcgctaccaggtaggtaccgacaacaaagctgtgctagctctggaagatccgtcacgcaacgcaccgcctatgctgcggaccaccttcactacacaggcaaaaaaaatcaagaaagcgcgtatttatgcgaccgctcggggcatttatgaaatgtaccttaatggtaaacgcgtcggccaggactattttaacccgggcctgacacagtataataagaatcatcagtaccaaatctatgaagttaccgacgcccttgagagcaacgctgccaatgcctggggagcgtggttgtcagaaggatggtggtcagggcatatcaccttttccggcggcaattggaatttctttggtgaccgtcaatcatttttaggtacgcttttaattgaatacgaggatggcacagtccaggagattaatacccagccccaatcatggaaattattcacggatggcccaattttaaacgggagttttttccaaggggaagtttacgacgcgaacaaggaatctgttctcactggctggtcgttagcacagtttgacgactcttcgtggaaatcggctcagaacgtaccgctggaaggaacgacttataccggtcctatgaccaacggcacactcgactataaacagctcaccctctcagcgcaaaacgatccgaccccaacgattattcgtaggctgaaagccgtgagcatggaagaagtgcgccccggagtgttcgtctacgatatgggacagaatatggtgggtgtcccgaaaattacactaagccatggccaccaaggtgacactgttattctgcgcttcgcggaagtgaaataccctgacctccctgcataccacccgcatagcggtatgattatgatggagaacatcagagcagctctcacccacgatatttatatccgtaagggaggcgatgaagttattcagccgcgctttacgtttcatgggtatcgttatgtggagattacaggtattaagaacgccccaccgctgaatgccgtggagggtctggtcataagtagcgtcgatagcatacgctcttcatatacgacctcaaaccaggacgtaaacaaattgtgggaaaacattacctggtcgatgctcggcaatttcttgagcattcccacagatactccggcccgcaacgagcgcatgggttggagcggcgatattaatgtgtttgctcggacctcaacctatttgggtgaggtgcttccgttcttgaaacgccatatgatggcgatgcgcgatttacaggcggcgaacggtaaatttgcagatgtgacgcccgtggggaatgggttcggcgggaccctgtggggttcagcgggaatcgtactgccttgggaactgtttctgcagtacggtgacaccactattttagaagaaaactatgaggccatgaaagcgtacctggcatttctggaaacgcgtgaggacaaagattcaggtgtgcaaatggaaggtccgctgggtgattggctgtcgcccgaagtgaacaagaacgataatacgcagttctttactgcgtaccaggcgtacggctatggtatcctgcatcaggtagcgcaaatcctgggcaaaccaaccgaagcagctaccttccaagccaaattcgcgagtcgcaaaaagtttctgatggatacatacttcgacgcgcgaactggcaaaagcatccacagcggagtcagcactcaaggccgtggtggttcaactgcccccgggacccaaaaaggtgatccaattgatacgcaagcctcttatgctattccgctctatcttgaggtgatcgatggtgatctgcaggaaaaagttctcgccaacctcattgcgacgctggcgcgtgaaaacgtagatgacatgggcattttgcgcccggcgtactcactcatgactggttttatcgcgaccgcggcgatcaatgaggcaatttcgcgttacggagatccagtacacgcgtatcgcctgttacagcagacgagctaccccagctggctgtatagcgttaaaaatggcgcaaccaccatttgggaacgcctgaactcttacactgtagaggacggcttcggtggcaacaactcgatgaacagcttcaaccactactcctttggcgccgtgggcgcctggatgtatatgtattctcttggcatccaacgtcacccggagattcctggatttaaaaaattccgtcttcagcctcaacccgatcccgatggtaaaatgacgtgggctaaaggccactatgatagcatgtatggacgtatacatagcgaatggaagcgtggcgttgatagctgggaatataaggccacggtgccacccaatacgtctgcagtgctggtattaccggtgaaagatctggaacgagtatccgagggcggtaagatgttgacagaagttctgggcatcacgctgatctctcgcgaaaacggttacattacgatggaacttagttccgggagctacactttcagcatcgaggagaacttatacttccaaggtagtcatcaccaccaccaccactga

SEQ ID NO: 1174 - DNA, 2157 bp, Artificial Sequence
  6xHis UPI0004B2D794
atggctaattggatctggtacccgggcgactttgagatctaccacggcatgtgtcagaattttgatcgtgaagaacgcggcttcttttggcccgcctactggcatattgccgactgccgtcatcatgtggtatttcatgcgagctgccgcttagaaaaagagaccgcattccgagtaactgccaagggcatcggccacgtgctggtgaagtgggaagagaaagcgccgagttggtttccggaaggccagccattttaccaggaaaaaaagtacaccatcggtgaatggatctcgtgccccgcgaaagaaattggtattgatgttgtgatcggcaatcgcacgggcctgccgtgcatttacgttgaaggcgaggttattcgcagtggtaagaactggactgtaaccgactttgcggcgccggaagtcccggtgggatggaacgatatgtatgttcgtgcacagcaggatcctcagatttttgaatacacacaggagttgtgcagaccggtttcaacagaacgtgtaaatggaggggtgctgtacgattttggtcgcgaactgacagcggacacactgattaagattaatggagaagagcgtcccgatcaggtcacgctgtgctacggtgaaagccgcaccgaagcgttggatacccagctttgctacctgaaacaagtcttggagattcctggcaaaaaggactcagtgcctgcgggctgtgccagtggtccggaacgtgaggccgattgtggtgcgagcccgtttggtcggtgggaaagcggtcagcgctatcataccaaattacgcgccttccgttacatttttgtacctgaaggtgagaatgcgagtttagtcaccgtggaagccctctacaaatatgttgactttcctaaacgttcttcctttagttgctcagatggcctgatcaaccggatctgggaagttgcggatactaccttccgtctcgccagcggcattttctttcttgatggcgtaaagcgtgataggtggatttggtcaggcgatgcgtaccaaagctattttatcaaccagtatctgttttttgacaaggatatttgcaaacgtaccattctcgcattacgcggcaatgacccggtgacggagcacatcaacacgatagtcgattactcgatgtactggattatcagcctcgaaaattactacaacatgtcaggtgatctggattttattagaatggtctatcctcgcatggaaagcctgctgcgctattgcatggagcagaccgacggccaaggtttcatttatggtcgggaaggcgactggatttacattgactgggcggaattagacaaagaaggcattctgtgtgcagaacagcagcttctggcgcgcagttacgaggcagtagcgagtgtgcgccgtctgttgggcttagatgcggaagaattcgatgtgcgtaaggaggctctgctgaaaaacattcgtcagtttttctgggacgaagaaaagggagccttcatcgattcgtaccagtccggtcgccgcaacgttacccgtcatgcgaacatctttgctgttttgtttggctatgccgatgaagcggagactgagtcaattctccacaaagtgttgttgaatgaagaagtggctgccattaccactccgtactttaaattttacgaactggaagcgcttgctaagctcggccgctttgaagtagtgatggacacattgaagagttactggggcgggatgctggagcgcggtgcagataccttttgggaggaatacaaaccggaacagcctgaagaagaacagtacggtatgtatggtgataaatatggcaagagcctgtgtcacgcatggggggcaagccctatttacctgttaggacgctactgtatgggggtgcgcccgacgggtacggcgtatgaaacatttgcggtggaaccgcagctggaactctttgatagctttagctgtagcttcccggtcaatgaaggtactgtttggatggattggaaggatggtgtgctggacgtctacaccgataaagatggcggcgtgctgaaggcggccggaaaggaatatacccttgaacgtggcaagcacgttgtggtaaagggacgcgaaaatctgtacttccagggcagtcatcaccatcaccaccattga

SEQ ID NO: 1175 - DNA, 2334 bp, Artificial Sequence
  6xHis UPI0003ED7515
atggtggagtggacagcggaatggatttggagcaaagagcgtttcaccgaccctaattcttgggtcgtcattcgtaaagaggtgaacctggagagtgtaggccagaatagcaccgcgtatatttccgcagatacaaaatactggctgtggatcaacggacagttagtagtttttgagggcagttacacaggcggtccgagtcccgttaaaccgagcccacgtgtcgacttttaccctatcgcctcgaacaaatattacgatcaggtagacattggtcgctacctgaaaaagggaaagaacaccattgcagcgctggcctggtactacggtgacaatggccagaaaggtacttatatttcctcgaatacggggggctttatctttcaagctcatgtgggcgataacgtgatcgctactgattcttcttggaaagttctgccgcatccggcgtatgacaaaaaagtcatcaaaaaaagcccgtaccgcgtggcggcgtggtctgtcaagtacgatgcccgtaaagacctcaacgattggagtaataaagcatggtacatgccaggctatgatgattctgactggcaaactccgcggattaaacgccagccgccgcgccctcctttctttggcctttacccgtccgaaattccgccgctcaacaattatggcctagcgaactgcgaaaattatccggaaagcaaatttccgtttattagcgacggtaaaacgattaaatgtaagctggatttcaacaaaaatttcaccccgtactttgacattgaagccaaagcgggtcaacagatccacattaaatccaacatgcgcctgaataccatagaaaccttctacacgaccaaggccgggcgccagcagtttgaaagctactcgtggttgaatggccgcattattgaatatcgaattccgaaaggcgtcaaagttcatggtcttaagtaccgctggaccggtgtgggcactaccccgggccactttgaagcggatgatgcatggtatagccgcatctggcagatggccgagaatacactgtatatttgtgcgcgtgataacttcatggataccccggaccgtgagcgcggcctttggattggtgacgttgccgatcaggcgagctacttattctatagcatggataaaccgggccgcgatctgcttaagaaagccatcaaagtaacgttagcattcagcgattcagagagtgggatctttgcgggcctgggcccgggacgttttcgtgaactgccggcgcaaagcctgcagttcatcgaacaggggatttggcactattactataatactggtgacctggaaactctgaaattcgcatatccttatgttcatagatacctgaccttgtggggcattaaggacaacggtcttgcaacgttccgcacgggtgattggaaatggaccgattggggcccccaggacacgattgattacgatgttattcaaaacgccctgtactactcagcgttggttagcgctcgtaaaatggcgaaggcagtaggcgattatactcacatcggtttatattcacatcgtattaacagcatcaaacaggcctaccagaaacattattggcagaacggctacttcagctctaacccgaataagttcaaggacgaccgggcgaacgcgattgcgattctgttcggtttggcaaagccggaacagtatcagcagattgtagataatgtgttgattcctaatcattttgcaagccctcacttcgagtggatggtgtacaatgcgatggctattgcgggacgctatgaggatgccctccagcgcatgaaaacccgttacgccaaacaggtggacaaccaggctcttagtactctggcggaatatcttccgtcaggtggaactgaaaatcatgcctggaacgcaccgagcaccgtcttaagccaacacattgcggggattgccccgacctcagtggcatgggaatcgtaccaggtgatgccgaacatggcgcatttcaaacgtgtgaagcagtttgtgcccagcgtgcaaggcgatatcgactttgaaattcagcgcgatcaacaaaccgttaaaattgaaattgacagccctgaaaataccaccgcaattatcggggtgccgaagcagtactttgccatccagacgatcatggtcaacgggaaaaaactgtgggagaacgggcaactgaccgcctcaatcagtggtataaagcttgccggcgaggataacaagtatgtaaaattcgaagttcagcctggacattggcttgttactgcgcagcgcgagaacctgtatttccagggtagtcatcatcaccaccaccattga

SEQ ID NO: 1176 - DNA, 3156 bp, Artificial Sequence
  6xHis UPI0000184198
atgtctgccctacgtgtaaccagccctagcgtagagtatgtgcagcgcccgttgggtctggatgcagctcatccacgtctcagctggccgatggcgtctgcagctccgggtcgtcgccagtctgcctaccaggtccgcgtagcgtctagcgcagccggattaagtcaccctgatgtctgggacagcggtaaagttgtaagcgatgatagcgtgctggttccgtatgcaggcccgccgctcaaacctcgcacccgttacttttggtcggttcgtgtttgggacgccgacggcggtgcctcggaatggtcggcaccgagctggtgggagacaggcttaatgggagcctcgcagtggtctgccaagtggattagcgcaccggcaccactgacggaggcgccgagcctagagggctcgtcttggatctggttcccggaaggtgaacctgccaatagcgcccctgcagcgacgcgctggtttaggcgaaccgtggatcttcccgatgatatcactggcgccaccctcgcaattagcgcggacaatgtttacgcggttagtgttgacggagctgaagttgcccgtaccgatctggaagctgataacgaaggctggcgccgccccgcagttatagatgtcctcgatcatgttcatagcgggaacaataccttggcggtgagcgccagtaatgctagcgtgggtccggcgggttggatttgcgttttggtccttaccaccgcctctggagaaaaaaagatctttagcgatgccagctggaaatctacagatcatgaaccagcggatgggtggcgcgaaccggattttgatgattcgggatggccggcagctaaagttgcggccgcgtggggtgcaggtccgtggggacgcgtggcacctgtggcttcagcggccaatcagttacgccatgaatttcgcctgccgcataaaaaagtcagccgagctcgcttgtacgccaccgccttagggctgtacgaggcccacttaaacggtcgtcgggtcgggcgcgaccagctagcaccggggtggaccgactatcgcaaacgtgtccagtaccaaacctatgatgtaacttcgtccgtgcgtccgggagctaatgccctagccgcgtatgtggctccgggatggtacgcgggtaacgtgggaatgttcgggccacaccaatatggcgagcgccctgcccttctagcccagttggaagtggaatacgcagatggcacctcagaacgtattacgtccggcccggactggcgcgcagcaagcggcccgattgtgtctgcggatctgctgtcgggcgagacctacgacgcccgtaaagagaccgccggctggacctcgccgggctttgacgatagggcgtggcttgccgtgcgtggcgccgataatgatgtacctgaacagattgttgcgcaggtggacggccccgtgcgaattgccaaagaactgcctgcccgcaaagtcacagaaccgaagcctggcgtctttgttttagatcttggccagaatatggtgggctctgtgcgtcttcgcgtgagcggtgacgcaggaactacagtccgactgcgccatgccgaagttttaaatccggatggcaccatttataccgctaacttacgttctgccgccgccacagatacctatacgcttaaaggccaaggcgaagaaacatacgagccacgtttcacgttccatggcttccggtacgtagaagtgaccggttttccgggcaaaccgagcaccacgagcgtcacaggccgtgtgatgcatacgtctgcaccgttcacgtttgaatttgaaacaaacgtcccgatgctgaataaactgcactcgaacatcacgtggggccaacgcggtaattttctcagtgttccgacggatactccagcgcgtgatgaacgccttggctggacgggagatatcaacgtttttgcgccgactgcagcctataccatggaaagcgcacgctttctcactaagtggctggttgatttacgtgatgctcaaactagcgatggcgccttcaccgatgtcgcgccagcagtaggcaacctgggtaacggtgtggcaggttggggcgatgcaggggtgaccgtaccgtgggcattatatcaggcgtatggggatcgtcaggttctcgctgacgccttaccgtcggttcacgcttggctccgttatctggaaaaacattcggatggattacttcgcccggctgatggttacggcgactggctgaacgtgtcagatgaaaccccgaaagatgtgattgccacggcatactttgcgcacagcgcggatctggcagcacgtatggccacggaactgggaaaagacgcagcgccgtacacggacttgttcacacgtattcgcaaagcgtttcagaccgcatatgtcgcaagtgacggcaaggtgaagggagatacccagtcagcgtacgttttaactcttagcatgaatctggtaccggatgcattgcgcaaagccgcagcggatcgcttagtagcccttattgaagcgaaagattggcatctgagcaccggcttcctgggtaccccgaggttactccctgttttaacggacacaggccataccgatgttgcataccgcctgctgcatcagagaacgtttccctcttggggctatccgattgacaaaggcagcactacaatgtgggaacgttgggactctatccagccagacggtggatttcagacaccggaaatgaatagcttcaatcactatgcttacggctcagtcggtgaatggatgtatgcgaacattgcaggtattgccccgggccgtgcggggtatcgccaagtagtgatccgcccgcgcccgggtggtgaagtaacaagtgcccgcgccacttttgcgagcttgcatggccccgtcagcacccgttggcaacaacgctccggaggcttcgttctaacgtgctcagtaccaccaaacacaaccgctgaagtctggatcccggcagatcacccggaccgtgttcagcatacacatggcacctttgtgcgtgcggaggatggttgcgccgtgtttgaagtcggttccggctcacatcgttttaccgttaaactggccgccgcactggaggagaatctctacttccaaggtagccaccatcatcaccaccattga

SEQ ID NO: 1177 - protein, 15 aa, Artificial Sequence
  N-terminal His-tag/linker
MHHHHHHENLYFQGS

SEQ ID NO: 1178 - protein, 14 aa, Artificial Sequence
  C-terminal linker/His tag
ENLYFQGSHHHHHH

SEQ ID NO: 1179 - protein, 828 aa, Artificial Sequence
  Seq ID No. 262 with mutation T365N
MNPASSTRTDTMTDTTARTDSRLTDALAALSLEQKVQLLTGRDFWNTWPIEEIGLRRILVSDGPSGVRGEVWDERDPSLNLPSATALASAWDPDIARRYGAAAAVEARRKGVDVVLGPTINLHRSPLGGRHFEAFSEDPVLTAELAAAYVTGVQDNGVGATPKHYVANDFETDRFTVDVRADERTLRELYLLAFEKAVTEARAWLVMSAYNGINGATATENDLLETPLNSEWGFDGVVVSDWTAVRSLESARSSQDLVMPGPVGPWGDALVEAVRTGAIDESVVDRKVLRILTLAQRVGALEGSPAIDPVWVEDGVALAREAAVEGTVLLENRDELPWDATSLRKVAVIGNNAAAARTQGGGSANVLPEYTVSPLDGVRAALPDAEVSYSLGAVVQDGLVELPLAELTNPVTGGPGLRARFLTADGAELFGEDRRKSVLVYFGGDAPIAAAATYELTARWTPTESQTVRLGFALIGAAQLYVDGELLVESDLQPSGTDLGAAFMNPLTASAEVELVAGKPVDVRLVHDLSAKEGFAAHALFLQLGTEPAEVDEDALIAEAAEAAEAADVVLVVVGTNSIVESEGYDRESLSLPGRQDDLVRAVVAANPRTVVLVNAGAPVLLPWRDDVAALLLGWFGGQEFGNAVADVLLGVAEPGGRLPTTWPAAEADVPVLSCTPVDGVVEYTEGIHIGYRAWLRSGATPAYWFGSGQGYTCVELTGVEAPSRARPGEIVTVSVEVANRGERDGKQVVQVYAEKPDSTVDRPVRWLVGSAPVRVPAGQTAQVEVAVPTRYLAHWAGGWQYEPGVYRLRVGTTAVELPLETTLEVSA

SEQ ID NO: 1180 - protein, 828 aa, Artificial Sequence
  Seq ID No. 262 with mutations T365N, R357M, A473F, L474C, I475F
MNPASSTRTDTMTDTTARTDSRLTDALAALSLEQKVQLLTGRDFWNTWPIEEIGLRRILVSDGPSGVRGEVWDERDPSLNLPSATALASAWDPDIARRYGAAAAVEARRKGVDVVLGPTINLHRSPLGGRHFEAFSEDPVLTAELAAAYVTGVQDNGVGATPKHYVANDFETDRFTVDVRADERTLRELYLLAFEKAVTEARAWLVMSAYNGINGATATENDLLETPLNSEWGFDGVVVSDWTAVRSLESARSSQDLVMPGPVGPWGDALVEAVRTGAIDESVVDRKVLRILTLAQRVGALEGSPAIDPVWVEDGVALAREAAVEGTVLLENRDELPWDATSLRKVAVIGNNAAAAMTQGGGSANVLPEYTVSPLDGVRAALPDAEVSYSLGAVVQDGLVELPLAELTNPVTGGPGLRARFLTADGAELFGEDRRKSVLVYFGGDAPIAAAATYELTARWTPTESQTVRLGFFCFGAAQLYVDGELLVESDLQPSGTDLGAAFMNPLTASAEVELVAGKPVDVRLVHDLSAKEGFAAHALFLQLGTEPAEVDEDALIAEAAEAAEAADVVLVVVGTNSIVESEGYDRESLSLPGRQDDLVRAVVAANPRTVVLVNAGAPVLLPWRDDVAALLLGWFGGQEFGNAVADVLLGVAEPGGRLPTTWPAAEADVPVLSCTPVDGVVEYTEGIHIGYRAWLRSGATPAYWFGSGQGYTCVELTGVEAPSRARPGEIVTVSVEVANRGERDGKQVVQVYAEKPDSTVDRPVRWLVGSAPVRVPAGQTAQVEVAVPTRYLAHWAGGWQYEPGVYRLRVGTTAVELPLETTLEVSA

SEQ ID NO: 1181 - protein, 828 aa, Artificial Sequence
  Seq ID No. 262 with mutations T365N, R357M, A473F, L474C, I475F, F44Y, F442Q
MNPASSTRTDTMTDTTARTDSRLTDALAALSLEQKVQLLTGRDYWNTWPIEEIGLRRILVSDGPSGVRGEVWDERDPSLNLPSATALASAWDPDIARRYGAAAAVEARRKGVDVVLGPTINLHRSPLGGRHFEAFSEDPVLTAELAAAYVTGVQDNGVGATPKHYVANDFETDRFTVDVRADERTLRELYLLAFEKAVTEARAWLVMSAYNGINGATATENDLLETPLNSEWGFDGVVVSDWTAVRSLESARSSQDLVMPGPVGPWGDALVEAVRTGAIDESVVDRKVLRILTLAQRVGALEGSPAIDPVWVEDGVALAREAAVEGTVLLENRDELPWDATSLRKVAVIGNNAAAAMTQGGGSANVLPEYTVSPLDGVRAALPDAEVSYSLGAVVQDGLVELPLAELTNPVTGGPGLRARFLTADGAELFGEDRRKSVLVYQGGDAPIAAAATYELTARWTPTESQTVRLGFFCFGAAQLYVDGELLVESDLQPSGTDLGAAFMNPLTASAEVELVAGKPVDVRLVHDLSAKEGFAAHALFLQLGTEPAEVDEDALIAEAAEAAEAADVVLVVVGTNSIVESEGYDRESLSLPGRQDDLVRAVVAANPRTVVLVNAGAPVLLPWRDDVAALLLGWFGGQEFGNAVADVLLGVAEPGGRLPTTWPAAEADVPVLSCTPVDGVVEYTEGIHIGYRAWLRSGATPAYWFGSGQGYTCVELTGVEAPSRARPGEIVTVSVEVANRGERDGKQVVQVYAEKPDSTVDRPVRWLVGSAPVRVPAGQTAQVEVAVPTRYLAHWAGGWQYEPGVYRLRVGTTAVELPLETTLEVSA

SEQ ID NO: 1182 - protein, 828 aa, Artificial Sequence
  Seq ID No. 262 with mutations T365N, R357M, A473F, L474C, I475F, F44Y, F442Q, V263L, F541I
MNPASSTRTDTMTDTTARTDSRLTDALAALSLEQKVQLLTGRDYWNTWPIEEIGLRRILVSDGPSGVRGEVWDERDPSLNLPSATALASAWDPDIARRYGAAAAVEARRKGVDVVLGPTINLHRSPLGGRHFEAFSEDPVLTAELAAAYVTGVQDNGVGATPKHYVANDFETDRFTVDVRADERTLRELYLLAFEKAVTEARAWLVMSAYNGINGATATENDLLETPLNSEWGFDGVVVSDWTAVRSLESARSSQDLVMPGPLGPWGDALVEAVRTGAIDESVVDRKVLRILTLAQRVGALEGSPAIDPVWVEDGVALAREAAVEGTVLLENRDELPWDATSLRKVAVIGNNAAAAMTQGGGSANVLPEYTVSPLDGVRAALPDAEVSYSLGAVVQDGLVELPLAELTNPVTGGPGLRARFLTADGAELFGEDRRKSVLVYQGGDAPIAAAATYELTARWTPTESQTVRLGFFCFGAAQLYVDGELLVESDLQPSGTDLGAAFMNPLTASAEVELVAGKPVDVRLVHDLSAKEGFAAHALILQLGTEPAEVDEDALIAEAAEAAEAADVVLVVVGTNSIVESEGYDRESLSLPGRQDDLVRAVVAANPRTVVLVNAGAPVLLPWRDDVAALLLGWFGGQEFGNAVADVLLGVAEPGGRLPTTWPAAEADVPVLSCTPVDGVVEYTEGIHIGYRAWLRSGATPAYWFGSGQGYTCVELTGVEAPSRARPGEIVTVSVEVANRGERDGKQVVQVYAEKPDSTVDRPVRWLVGSAPVRVPAGQTAQVEVAVPTRYLAHWAGGWQYEPGVYRLRVGTTAVELPLETTLEVSA

SEQ ID NO: 1183 - protein, 828 aa, Artificial Sequence
  Seq ID No. 262 with mutations F44Y, V263L, R357M, T365N, F442Q, L474C, I475F, F541I, A355W, L367C, Q396R
MNPASSTRTDTMTDTTARTDSRLTDALAALSLEQKVQLLTGRDYWNTWPIEEIGLRRILVSDGPSGVRGEVWDERDPSLNLPSATALASAWDPDIARRYGAAAAVEARRKGVDVVLGPTINLHRSPLGGRHFEAFSEDPVLTAELAAAYVTGVQDNGVGATPKHYVANDFETDRFTVDVRADERTLRELYLLAFEKAVTEARAWLVMSAYNGINGATATENDLLETPLNSEWGFDGVVVSDWTAVRSLESARSSQDLVMPGPLGPWGDALVEAVRTGAIDESVVDRKVLRILTLAQRVGALEGSPAIDPVWVEDGVALAREAAVEGTVLLENRDELPWDATSLRKVAVIGNNAAWAMTQGGGSANVCPEYTVSPLDGVRAALPDAEVSYSLGAVVRDGLVELPLAELTNPVTGGPGLRARFLTADGAELFGEDRRKSVLVYQGGDAPIAAAATYELTARWTPTESQTVRLGFACFGAAQLYVDGELLVESDLQPSGTDLGAAFMNPLTASAEVELVAGKPVDVRLVHDLSAKEGFAAHALILQLGTEPAEVDEDALIAEAAEAAEAADVVLVVVGTNSIVESEGYDRESLSLPGRQDDLVRAVVAANPRTVVLVNAGAPVLLPWRDDVAALLLGWFGGQEFGNAVADVLLGVAEPGGRLPTTWPAAEADVPVLSCTPVDGVVEYTEGIHIGYRAWLRSGATPAYWFGSGQGYTCVELTGVEAPSRARPGEIVTVSVEVANRGERDGKQVVQVYAEKPDSTVDRPVRWLVGSAPVRVPAGQTAQVEVAVPTRYLAHWAGGWQYEPGVYRLRVGTTAVELPLETTLEVSA

SEQ ID NO: 1184 - DNA, 2532 bp, Artificial Sequence
  Codon optimised DNA encoding N-terminal 6xHis amino acid sequence of Seq ID No. 1179
atgcatcaccatcaccaccacgaaaatttatatttccagggctcaatgaatccagcgtcgtcaacccgtactgacaccatgacagacacgaccgctcggactgattcacgcttaaccgacgcattggccgctctatcattagaacagaaagtacagctcctgaccggccgtgatttctggaatacatggcctatcgaagaaattggccttcgtcgcatcctggtttcagatgggccttcgggtgttcgtggtgaagtttgggatgaacgcgacccgagcttgaatctgcccagcgctactgcgctggcgtcggcatgggacccagatatagcgcgccgctatggtgccgccgccgccgtggaagcccgtagaaaaggtgtggatgtggtgttaggcccgaccattaatctgcaccgcagcccgctggggggtcgtcattttgaagccttctcagaagacccggtactgacagcggaactagcagcggcctatgtaacaggcgtacaggacaacggtgtgggtgccactccgaaacactatgtcgccaatgattttgaaactgatcgtttcactgtggacgtacgcgcagatgaacgtacccttagagaattgtacctcctggcctttgaaaaggcggtaactgaagcgcgtgcatggctcgtaatgagtgcctataacggtattaacggagccactgccacagagaacgacctgctggaaaccccgctaaatagcgaatggggctttgatggtgtcgtagtgtcagattggaccgccgtgcgcagcctggaatcagctcgcagctcgcaggatctggtcatgccgggtccggttggtccgtggggggatgctcttgtggaggcggtccgcactggtgccatcgacgaaagtgtggtggatcgcaaagtgctgcgtattttaaccttagctcagcgcgttggggcgctggaaggtagcccggccattgatcctgtgtgggttgaagatggggttgccctggcccgtgaagcggcggtagaagggaccgtcctcttagaaaatcgtgacgaactaccgtgggatgccacctcgttacgcaaagtagctgtgataggcaataatgcagccgctgcgaggacacaaggtggtggcagcgcgaacgtattgccggaatatacagtcagcccgttagacggtgtgcgggcggcgctgccggatgcagaggtaagctatagcctgggtgccgtagtgcaagatggcctcgtagaactcccgttagcggaattgaccaatccagtgactggtggcccgggcttacgcgcgcgctttctgacggcagacggcgcagaactgttcggtgaagaccgtcgtaaatccgtcctggtgtatttcggcggtgatgcgccgatcgcggcggcagcgacctatgaattaaccgcacgctggaccccgactgaaagccaaacggttagactgggattcgcactgattggcgccgcgcagttatacgtagatggcgaattgctggttgaaagtgatcttcagccaagcggcacagatttgggcgccgccttcatgaacccattaacagcctcagctgaagtagaacttgttgccggcaaacctgttgatgttcgcctggtgcatgacttgagcgcgaaagaaggttttgccgcacacgcgttgtttttacagctgggtaccgaaccggctgaggttgatgaagatgcattaattgctgaagccgcagaagcggctgaagcagccgatgttgttctcgttgttgtcggtacgaactctattgtggagtccgaaggatacgatcgcgaaagtctaagtctgccaggtcgccaagatgatctggtccgcgcggtcgtggcagccaatccgcgcaccgtggtactggttaacgcgggtgcaccggtcttgctgccttggcgtgatgacgtagcagcactgttactgggatggttcggtggacaggaattcgggaacgctgttgcagacgtcctgctgggcgtagctgaaccaggcggtcgcctgcctaccacctggcctgccgcggaagcggatgttcccgtgttgagctgcacccctgttgacggggttgtcgaatatactgagggcattcatatcggatatcgagcgtggctgcgttcaggagcgaccccagcgtactggtttggttctgggcagggttacacttgcgttgaactgaccggtgttgaggctccgtcacgcgcccgcccgggtgaaattgttaccgtttcggttgaagttgccaatcgtggcgaacgtgatgggaaacaagttgtgcaggtgtatgcagaaaaaccagatagtacagtcgatcgtccggtacgttggttagtgggctcggcacctgttcgtgtgcctgcgggtcaaaccgcccaggtggaagtggcggttccaacccgttatctggctcactgggcgggaggctggcaatatgaaccgggcgtttaccgtttaagagtcgggactaccgcggtcgaattaccgctcgaaacaaccttagaagtgtcggcctga

SEQ ID NO: 1185 - DNA, 2532 bp, Artificial Sequence
  Codon optimised DNA encoding N-terminal 6xHis amino acid sequence of Seq ID No. 1180
atgcatcaccatcaccaccacgaaaatttatatttccagggctcaatgaatccagcgtcgtcaacccgtactgacaccatgacagacacgaccgctcggactgattcacgcttaaccgacgcattggccgctctatcattagaacagaaagtacagctcctgaccggccgtgatttctggaatacatggcctatcgaagaaattggccttcgtcgcatcctggtttcagatgggccttcgggtgttcgtggtgaagtttgggatgaacgcgacccgagcttgaatctgcccagcgctactgcgctggcgtcggcatgggacccagatatagcgcgccgctatggtgccgccgccgccgtggaagcccgtagaaaaggtgtggatgtggtgttaggcccgaccattaatctgcaccgcagcccgctggggggtcgtcattttgaagccttctcagaagacccggtactgacagcggaactagcagcggcctatgtaacaggcgtacaggacaacggtgtgggtgccactccgaaacactatgtcgccaatgattttgaaactgatcgtttcactgtggacgtacgcgcagatgaacgtacccttagagaattgtacctcctggcctttgaaaaggcggtaactgaagcgcgtgcatggctcgtaatgagtgcctataacggtattaacggagccactgccacagagaacgacctgctggaaaccccgctaaatagcgaatggggctttgatggtgtcgtagtgtcagattggaccgccgtgcgcagcctggaatcagctcgcagctcgcaggatctggtcatgccgggtccggttggtccgtggggggatgctcttgtggaggcggtccgcactggtgccatcgacgaaagtgtggtggatcgcaaagtgctgcgtattttaaccttagctcagcgcgttggggcgctggaaggtagcccggccattgatcctgtgtgggttgaagatggggttgccctggcccgtgaagcggcggtagaagggaccgtcctcttagaaaatcgtgacgaactaccgtgggatgccacctcgttacgcaaagtagctgtgataggcaataatgcagccgctgcgatgacacaaggtggtggcagcgcgaacgtattgccggaatatacagtcagcccgttagacggtgtgcgggcggcgctgccggatgcagaggtaagctatagcctgggtgccgtagtgcaggatggcctcgtagaactcccgttagcggaattgaccaatccagtgactggtggcccgggcttacgcgcgcgctttctgacggcagacggcgcagaactgttcggtgaagaccgtcgtaaatccgtcctggtttatttcggcggtgatgcgccgatcgcggcggcagcgacctatgaattaaccgcacgctggaccccgactgaaagccaaacggttagactgggatttttctgttttggcgccgcgcagttatacgtagatggcgaattgctggttgaaagtgatcttcagccaagcggcacagatttgggcgccgccttcatgaacccattaacagcctcagctgaagtagaacttgttgccggcaaacctgttgatgttcgcctggtgcatgacttgagcgcgaaagaaggttttgccgcacacgcgttgtttttacagctgggtaccgaaccggctgaggttgatgaagatgcattaattgctgaagccgcagaagcggctgaagcagccgatgttgttctcgttgttgtcggtacgaactctattgtggagtccgaaggatatgatcgcgaaagtctaagtctgccaggtcgccaagatgatctggtccgcgcggtcgtggcagccaatccgcgcaccgtggtactggttaacgcgggtgcaccggtcttgctgccttggcgtgatgacgtagcagcactgttactgggatggttcggtggacaggaattcgggaacgctgttgcagacgtcctgctgggcgtagctgaaccaggcggtcgcctgcctaccacctggcctgccgcggaagcggatgttcccgtgttgagctgcacccctgttgacggggttgtcgaatatactgagggcattcatatcggatatcgagcgtggctgcgttcaggagcgaccccagcgtactggtttggttctgggcagggttacacttgcgttgaactgaccggtgttgaggctccgtcacgcgcccgcccgggtgaaattgttaccgtttcggttgaagttgccaatcgtggcgaacgtgatgggaaacaagttgtgcaggtgtatgcagaaaaaccagatagtacagtcgatcgtccggtacgttggttagtgggctcggcacctgttcgtgtgcctgcgggtcaaaccgcccaggtggaagtggcggttccaacccgttatctggctcactgggcgggaggctggcaatatgaaccgggcgtttaccgtttaagagtcgggactaccgcggtcgaattaccgctcgaaacaaccttagaagtgtcggcctga

SEQ ID NO: 1186 - DNA, 2532 bp, Artificial Sequence
  Codon optimised DNA encoding N-terminal 6xHis amino acid sequence of Seq ID No. 1181
atgcatcaccatcaccaccacgaaaatttatatttccagggctcaatgaatccagcgtcgtcaacccgtactgacaccatgacagacacgaccgctcggactgattcacgcttaaccgacgcattggccgctctatcattagaacagaaagtacagctcctgaccggccgtgattattggaatacatggcctatcgaagaaattggccttcgtcgcatcctggtgtcagatgggccttcgggtgttcgtggtgaagtttgggatgaacgcgacccgagcttgaatctgcccagcgctactgcgctggcgtcggcatgggacccagatatagcgcgccgctatggtgccgccgccgccgtggaagcccgtagaaaaggtgtggatgtggtgttaggcccgaccattaatctgcaccgcagcccgctggggggtcgtcattttgaagccttctcagaagacccggtactgacagcggaactagcagcggcctatgtaacaggcgtacaggacaacggtgtgggtgccactccgaaacactatgtcgccaatgattttgaaactgatcgtttcactgtggacgtacgcgcagatgaacgtacccttagagaattgtacctcctggcctttgaaaaggcggtaactgaagcgcgtgcatggctcgtaatgagtgcctataacggtattaacggagccactgccacagagaacgacctgctggaaaccccgctaaatagcgaatggggctttgatggtgtcgtagtgtcagattggaccgccgtgcgcagcctggaatcagctcgcagctcgcaggatctggtcatgccgggtccggttggtccgtggggggatgctcttgtggaggcggtccgcactggtgccatcgacgaaagtgtggtggatcgcaaagtgctgcgtattttaaccttagctcagcgcgttggggcgctggaaggtagcccggccattgatcctgtgtgggttgaagatggggttgccctggcccgtgaagcggcggtagaagggaccgtcctcttagaaaatcgtgacgaactaccgtgggatgccacctcgttacgcaaagtagctgtgataggcaataatgcagccgctgcgatgacacaaggtggtggcagcgcgaacgtattgccggaatatacagtcagcccgttagacggtgtgcgggcggcgctgccggatgcagaggtaagctatagcctgggtgccgtagtgcaggatggcctcgtagaactcccgttagcggaattgaccaatccagtgactggtggcccgggcttacgcgcgcgctttctgacggcagacggcgcagaactgttcggtgaagaccgtcgtaaatccgtcctggtttatcaaggcggtgatgcgccgatcgcggcggcagcgacctatgaattaaccgcacgctggaccccgactgaaagccaaacggttagactgggatttttctgttttggcgccgcgcagttatacgtagatggcgaattgctggttgaaagtgatcttcagccaagcggcacagacttgggcgccgccttcatgaacccattaacagcctcagctgaagtagaacttgttgccggcaaacctgttgatgttcgcctggtgcatgacttgagcgcgaaagaaggttttgcagcacacgcgttgtttttacagctgggtaccgaaccggctgaggttgatgaagatgcattaattgctgaagccgcagaagcggctgaagcagccgatgttgttctcgttgttgtcggtacgaactctattgtggagtccgaaggatatgatcgcgaaagtctaagtctgccaggtcgccaagatgatctggtccgcgcggtcgtggcagccaatccgcgcaccgtggtactggttaacgcgggtgcaccggtcttgctgccttggcgtgatgacgtagcagcactgttactgggatggttcggtggacaggaattcgggaacgctgttgcagacgtcctgctgggcgtagctgaaccaggcggtcgcctgcctaccacctggcctgccgcggaagcggatgttcccgtgttgagctgcacccctgttgacggggttgtcgaatatactgagggcattcatatcggatatcgagcgtggctgcgttcaggagcgaccccagcgtactggtttggttctgggcagggttacacttgcgttgaactgaccggtgttgaggctccgtcacgcgcccgcccgggtgaaattgttaccgtttcggttgaagttgccaatcgtggcgaacgtgatgggaaacaagttgtgcaggtgtatgcagaaaaaccagatagtacagtcgatcgtccggtacgttggttagtgggctcggcacctgttcgtgtgcctgcgggtcaaaccgcccaggtggaagtggcggttccaacccgttatctggctcactgggcgggaggctggcaatatgaaccgggcgtttaccgtttaagagtcgggactaccgcggtcgaattaccgctcgaaacaaccttagaagtgtcggcctga

SEQ ID NO: 1187 - DNA, 2532 bp, Artificial Sequence
  Codon optimised DNA encoding N-terminal 6xHis amino acid sequence of Seq ID No. 1182
atgcatcaccatcaccaccacgaaaatttatatttccagggctcaatgaatccagcgtcgtcaacccgtactgacaccatgacagacacgaccgctcggactgattcacgcttaaccgacgcattggccgctctatcattagaacagaaagtacagctcctgaccggccgtgattattggaatacatggcctatcgaagaaattggccttcgtcgcatcctggtgtcagatgggccttcgggtgttcgtggtgaagtttgggatgaacgcgacccgagcttgaatctgcccagcgctactgcgctggcgtcggcatgggacccagatatagcgcgccgctatggtgccgccgccgccgtggaagcccgtagaaaaggtgtggatgtggtgttaggcccgaccattaatctgcaccgcagcccgctggggggtcgtcattttgaagccttctcagaagacccggtactgacagcggaactagcagcggcctatgtaacaggcgtacaggacaacggtgtgggtgccactccgaaacactatgtcgccaatgattttgaaactgatcgtttcactgtggacgtacgcgcagatgaacgtacccttagagaattgtacctcctggcctttgaaaaggcggtaactgaagcgcgtgcatggctcgtaatgagtgcctataacggtattaacggagccactgccacagagaacgacctgctggaaaccccgctaaatagcgaatggggctttgatggtgtcgtagtgtcagattggaccgccgtgcgcagcctggaatcagctcgcagctcgcaggatctggtcatgccgggtccgctgggtccgtggggggatgctcttgtggaggcggtccgcactggtgccatcgacgaaagtgtggtggatcgcaaagtgctgcgtattttaaccttagctcagcgcgttggggcgctggaaggtagcccggccattgatcctgtgtgggttgaagatggggttgccctggcccgtgaagcggcggtagaagggaccgtcctcttagaaaatcgtgacgaactaccgtgggatgccacctcgttacgcaaagtagctgtgataggcaataatgcagccgctgcgatgacacaaggtggtggcagcgcgaacgtattgccggaatatacagtcagcccgttagacggtgtgcgggcggcgctgccggatgcagaggtaagctatagcctgggtgccgtagtgcaggatggcctcgtagaactcccgttagcggaattgaccaatccagtgactggtggcccgggcttacgcgcgcgctttctgacggcagacggcgcagaactgttcggtgaagaccgtcgtaaatccgtcctggtttatcaaggcggtgatgcgccgatcgcggcggcagcgacctatgaattaaccgcacgctggaccccgactgaaagccaaacggttagactgggatttttctgttttggcgccgcgcagttatacgtagatggcgaattgctggttgaaagtgatcttcagccaagcggcacagacttgggcgccgccttcatgaacccattaacagcctcagctgaagtagaacttgttgccggcaaacctgttgatgttcgcctggtgcatgacttgagcgcgaaagaaggttttgcagcacacgcgttgatattacagctgggtaccgaaccggctgaggttgatgaagatgcattaattgctgaagccgcagaagcggctgaagcagccgatgttgttctcgttgttgtcggtacgaactctattgtggagtccgaaggatatgatcgcgaaagtctaagtctgccaggtcgccaagatgatctggtccgcgcggtcgtggcagccaatccgcgcaccgtggtactggttaacgcgggtgcaccggtcttgctgccttggcgtgatgacgtagcagcactgttactgggatggttcggtggacaggaattcgggaacgctgttgcagacgtcctgctgggcgtagctgaaccaggcggtcgcctgcctaccacctggcctgccgcggaagcggatgttcccgtgttgagctgcacccctgttgacggggttgtcgaatatactgagggcattcatatcggatatcgagcgtggctgcgttcaggagcgaccccagcgtactggtttggttctgggcagggttacacttgcgttgaactgaccggtgttgaggctccgtcacgcgcccgcccgggtgaaattgttaccgtttcggttgaagttgccaatcgtggcgaacgtgatgggaaacaagttgtgcaggtgtatgcagaaaaaccagatagtacagtcgatcgtccggtacgttggttagtgggctcggcacctgttcgtgtgcctgcgggtcaaaccgcccaggtggaagtggcggttccaacccgttatctggctcactgggcgggaggctggcaatatgaaccgggcgtttaccgtttaagagtcgggactaccgcggtcgaattaccgctcgaaacaaccttagaagtgtcggcctga

SEQ ID NO: 1188 - DNA, 2532 bp, Artificial Sequence
  Codon optimised DNA encoding N-terminal 6xHis amino acid sequence of Seq ID No. 1183
atgcatcaccatcaccaccacgaaaatttatatttccagggctcaatgaatccagcgtcgtcaacccgtactgacaccatgacagacacgaccgctcggactgattcacgcttaaccgacgcattggccgctctatcattagaacagaaagtacagctcctgaccggccgtgattattggaatacatggcctatcgaagaaattggccttcgtcgcatcctggtgtcagatgggccttcgggtgttcgtggtgaagtttgggatgaacgcgacccgagcttgaatctgcccagcgctactgcgctggcgtcggcatgggacccagatatagcgcgccgctatggtgccgccgccgccgtggaagcccgtagaaaaggtgtggatgtggtgttaggcccgaccattaatctgcaccgcagcccgctggggggtcgtcattttgaagccttctcagaagacccggtactgacagcggaactagcagcggcctatgtaacaggcgtacaggacaacggtgtgggtgccactccgaaacactatgtcgccaatgattttgaaactgatcgtttcactgtggacgtacgcgcagatgaacgtacccttagagaattgtacctcctggcctttgaaaaggcggtaactgaagcgcgtgcatggctcgtaatgagtgcctataacggtattaacggagccactgccacagagaacgacctgctggaaaccccgctaaatagcgaatggggctttgatggtgtcgtagtgtcagattggaccgccgtgcgcagcctggaatcagctcgcagctcgcaggatctggtcatgccgggtccgctgggtccgtggggggatgctcttgtggaggcggtccgcactggtgccatcgacgaaagtgtggtggatcgcaaagtgctgcgtattttaaccttagctcagcgcgttggggcgctggaaggtagcccggccattgatcctgtgtgggttgaagatggggttgccctggcccgtgaagcggcggtagaagggaccgtcctcttagaaaatcgtgacgaactaccgtgggatgccacctcgttacgcaaagtagctgtgataggcaataatgcagcctgggcgatgacacaaggtggtggcagcgcgaacgtatgcccggaatatacagtcagcccgttagacggtgtgcgggcggcgctgccggatgcagaggtaagctatagcctgggtgccgtagtgcgggatggcctcgtagaactcccgttagcggaattgaccaatccagtgactggtggcccgggcttacgcgcgcgctttctgacggcagacggcgcagaactgttcggtgaagaccgtcgtaaatccgtcctggtttatcaaggcggtgatgcgccgatcgcggcggcagcgacctatgaattaaccgcacgctggaccccgactgaaagccaaacggttagactgggatttgcatgttttggcgccgcgcagttatacgtagatggcgaattgctggttgaaagtgatcttcagccaagcggcacagacttgggcgccgccttcatgaacccattaacagcctcagctgaagtagaacttgttgccggcaaacctgttgatgttcgcctggtgcatgacttgagcgcgaaagaaggttttgcagcacacgcgttgatattacagctgggtaccgaaccggctgaggttgatgaagatgcattaattgctgaagccgcagaagcggctgaagcagccgatgttgttctcgttgttgtcggtacgaactctattgtggagtccgaaggatatgatcgcgaaagtctaagtctgccaggtcgccaagatgatctggtccgcgcggtcgtggcagccaatccgcgcaccgtggtactggttaacgcgggtgcaccggtcttgctgccttggcgtgatgacgtagcagcactgttactgggatggttcggtggacaggaattcgggaacgctgttgcagacgtcctgctgggcgtagctgaaccaggcggtcgcctgcctaccacctggcctgccgcggaagcggatgttcccgtgttgagctgcacccctgttgacggggttgtcgaatatactgagggcattcatatcggatatcgagcgtggctgcgttcaggagcgaccccagcgtactggtttggttctgggcagggttacacttgcgttgaactgaccggtgttgaggctccgtcacgcgcccgcccgggtgaaattgttaccgtttcggttgaagttgccaatcgtggcgaacgtgatgggaaacaagttgtgcaggtgtatgcagaaaaaccagatagtacagtcgatcgtccggtacgttggttagtgggctcggcacctgttcgtgtgcctgcgggtcaaaccgcccaggtggaagtggcggttccaacccgttatctggctcactgggcgggaggctggcaatatgaaccgggcgtttaccgtttaagagtcgggactaccgcggtcgaattaccgctcgaaacaaccttagaagtgtcggcctga

SEQ ID NO: 1189 - protein, 930 aa, Artificial Sequence
  Seq ID No. 1017 with mutation K219G
MSFPAAPARLRFEHRTDPGPVLGIGTATPRLSWQVPTAPDDYRQAGYEVEIARGDAAPEQYTVDSADQVLVPWPGTPLAARESATVRVRVRGDGDWSQWSDPATVEAGLLSADDWTARFVSPRENAGHEAPAPLIGGVIDLPADIAQARLYATAHGIYEPTLNGTRVGDEQLAPGWTAYEQRLRYQTYDVTDLVAPGENRLELLVGNGWYRGRLGFHGGHSLYGDRLAVLAQLEVTTATGEVKVLASDGTWTTRETNVLADDLYDGQHVDLRRTLGEPGPVDVLDADLSLLVAPDGPPVRVTDVLPAKAVTTSPAGKTLVDFGQNVVGRLRLRVRGGAAGDEIVLRHAEVLEDGELGVRPLRTAKATDSFVLAGPDEVTLEPTLTFHGFRYAEITGVPDLRAEDVEAVVVGSDLRRTGWFESSHPLLDRFHENVVWGMRGNFLDVPTDCPQRDERLGWTGDIQVFSPTASFLFDTAGFLTNWLADLIAEQHKDGSVPFVVPDVLRQPGPATAAWGDAATIVPWVLYERTGDAGLLARQLPSMRAWVDRMAGLAGDDLLWVGGFQFGDWLDPTAPPDDPFRAKADPDVLATAHLARSAEVVALAAEVVGAGELAREYAELAARVRQAFAAEYTTGSGRVLSDAATNYALALQWALLPTEAQRKRAGERLADLVRTAGFRISTGFVGTPLMADALADSGHPDLAYRLLLETGCPSWLYAVTMDATTVWERWDSMLPDGSINPGQMTSFNHYALGAVADWMHRRVAGLAPGDPGYRRIVVDPLFTAHLTKASARHLTPYGEAAVAWSRSGGRVRLEVTVPVGARARVAVPGESAPVEVGHGTHEWTADDVYGETPPLPADATIRQLIDHEPSWTTLAAAATRTGIVADDAELAGRLERYLDHPATELVDAVSPRGFSPSAEALQAELDSVLGR

SEQ ID NO: 1190 - protein, 930 aa, Artificial Sequence
  Seq ID No. 1017 with mutations A143P, L214M, K219G, Q921H
MSFPAAPARLRFEHRTDPGPVLGIGTATPRLSWQVPTAPDDYRQAGYEVEIARGDAAPEQYTVDSADQVLVPWPGTPLAARESATVRVRVRGDGDWSQWSDPATVEAGLLSADDWTARFVSPRENAGHEAPAPLIGGVIDLPPDIAQARLYATAHGIYEPTLNGTRVGDEQLAPGWTAYEQRLRYQTYDVTDLVAPGENRLELLVGNGWYRGRMGFHGGHSLYGDRLAVLAQLEVTTATGEVKVLASDGTWTTRETNVLADDLYDGQHVDLRRTLGEPGPVDVLDADLSLLVAPDGPPVRVTDVLPAKAVTTSPAGKTLVDFGQNVVGRLRLRVRGGAAGDEIVLRHAEVLEDGELGVRPLRTAKATDSFVLAGPDEVTLEPTLTFHGFRYAEITGVPDLRAEDVEAVVVGSDLRRTGWFESSHPLLDRFHENVVWGMRGNFLDVPTDCPQRDERLGWTGDIQVFSPTASFLFDTAGFLTNWLADLIAEQHKDGSVPFVVPDVLRQPGPATAAWGDAATIVPWVLYERTGDAGLLARQLPSMRAWVDRMAGLAGDDLLWVGGFQFGDWLDPTAPPDDPFRAKADPDVLATAHLARSAEVVALAAEVVGAGELAREYAELAARVRQAFAAEYTTGSGRVLSDAATNYALALQWALLPTEAQRKRAGERLADLVRTAGFRISTGFVGTPLMADALADSGHPDLAYRLLLETGCPSWLYAVTMDATTVWERWDSMLPDGSINPGQMTSFNHYALGAVADWMHRRVAGLAPGDPGYRRIVVDPLFTAHLTKASARHLTPYGEAAVAWSRSGGRVRLEVTVPVGARARVAVPGESAPVEVGHGTHEWTADDVYGETPPLPADATIRQLIDHEPSWTTLAAAATRTGIVADDAELAGRLERYLDHPATELVDAVSPRGFSPSAEALHAELDSVLGR

SEQ ID NO: 1191 - protein, 930 aa, Artificial Sequence
  Seq ID No. 1017 with mutations A143P, L214M, K219G, Q921H, G357C
MSFPAAPARLRFEHRTDPGPVLGIGTATPRLSWQVPTAPDDYRQAGYEVEIARGDAAPEQYTVDSADQVLVPWPGTPLAARESATVRVRVRGDGDWSQWSDPATVEAGLLSADDWTARFVSPRENAGHEAPAPLIGGVIDLPPDIAQARLYATAHGIYEPTLNGTRVGDEQLAPGWTAYEQRLRYQTYDVTDLVAPGENRLELLVGNGWYRGRMGFHGGHSLYGDRLAVLAQLEVTTATGEVKVLASDGTWTTRETNVLADDLYDGQHVDLRRTLGEPGPVDVLDADLSLLVAPDGPPVRVTDVLPAKAVTTSPAGKTLVDFGQNVVGRLRLRVRGGAAGDEIVLRHAEVLEDGELCVRPLRTAKATDSFVLAGPDEVTLEPTLTFHGFRYAEITGVPDLRAEDVEAVVVGSDLRRTGWFESSHPLLDRFHENVVWGMRGNFLDVPTDCPQRDERLGWTGDIQVFSPTASFLFDTAGFLTNWLADLIAEQHKDGSVPFVVPDVLRQPGPATAAWGDAATIVPWVLYERTGDAGLLARQLPSMRAWVDRMAGLAGDDLLWVGGFQFGDWLDPTAPPDDPFRAKADPDVLATAHLARSAEVVALAAEVVGAGELAREYAELAARVRQAFAAEYTTGSGRVLSDAATNYALALQWALLPTEAQRKRAGERLADLVRTAGFRISTGFVGTPLMADALADSGHPDLAYRLLLETGCPSWLYAVTMDATTVWERWDSMLPDGSINPGQMTSFNHYALGAVADWMHRRVAGLAPGDPGYRRIVVDPLFTAHLTKASARHLTPYGEAAVAWSRSGGRVRLEVTVPVGARARVAVPGESAPVEVGHGTHEWTADDVYGETPPLPADATIRQLIDHEPSWTTLAAAATRTGIVADDAELAGRLERYLDHPATELVDAVSPRGFSPSAEALHAELDSVLGR

SEQ ID NO: 1192 - protein, 930 aa, Artificial Sequence
  Seq ID No. 1017 with mutations A143P, L214M, G215S, G218N, K219G, G357C, G508S, G634A, Q921H
MSFPAAPARLRFEHRTDPGPVLGIGTATPRLSWQVPTAPDDYRQAGYEVEIARGDAAPEQYTVDSADQVLVPWPGTPLAARESATVRVRVRGDGDWSQWSDPATVEAGLLSADDWTARFVSPRENAGHEAPAPLIGGVIDLPPDIAQARLYATAHGIYEPTLNGTRVGDEQLAPGWTAYEQRLRYQTYDVTDLVAPGENRLELLVGNGWYRGRMSFHNGHSLYGDRLAVLAQLEVTTATGEVKVLASDGTWTTRETNVLADDLYDGQHVDLRRTLGEPGPVDVLDADLSLLVAPDGPPVRVTDVLPAKAVTTSPAGKTLVDFGQNVVGRLRLRVRGGAAGDEIVLRHAEVLEDGELCVRPLRTAKATDSFVLAGPDEVTLEPTLTFHGFRYAEITGVPDLRAEDVEAVVVGSDLRRTGWFESSHPLLDRFHENVVWGMRGNFLDVPTDCPQRDERLGWTGDIQVFSPTASFLFDTAGFLTNWLADLIAEQHKDGSVPFVVPDVLRQPSPATAAWGDAATIVPWVLYERTGDAGLLARQLPSMRAWVDRMAGLAGDDLLWVGGFQFGDWLDPTAPPDDPFRAKADPDVLATAHLARSAEVVALAAEVVGAGELAREYAELAARVRQAFAAEYTTASGRVLSDAATNYALALQWALLPTEAQRKRAGERLADLVRTAGFRISTGFVGTPLMADALADSGHPDLAYRLLLETGCPSWLYAVTMDATTVWERWDSMLPDGSINPGQMTSFNHYALGAVADWMHRRVAGLAPGDPGYRRIVVDPLFTAHLTKASARHLTPYGEAAVAWSRSGGRVRLEVTVPVGARARVAVPGESAPVEVGHGTHEWTADDVYGETPPLPADATIRQLIDHEPSWTTLAAAATRTGIVADDAELAGRLERYLDHPATELVDAVSPRGFSPSAEALHAELDSVLGR

SEQ ID NO: 1193 - protein, 930 aa, Artificial Sequence
  Seq ID No. 1017 with mutations A143P, L214M, G215S, G218D, K219G, G357C, G508S, G634A, A690C, Q921H
MSFPAAPARLRFEHRTDPGPVLGIGTATPRLSWQVPTAPDDYRQAGYEVEIARGDAAPEQYTVDSADQVLVPWPGTPLAARESATVRVRVRGDGDWSQWSDPATVEAGLLSADDWTARFVSPRENAGHEAPAPLIGGVIDLPPDIAQARLYATAHGIYEPTLNGTRVGDEQLAPGWTAYEQRLRYQTYDVTDLVAPGENRLELLVGNGWYRGRMSFHDGHSLYGDRLAVLAQLEVTTATGEVKVLASDGTWTTRETNVLADDLYDGQHVDLRRTLGEPGPVDVLDADLSLLVAPDGPPVRVTDVLPAKAVTTSPAGKTLVDFGQNVVGRLRLRVRGGAAGDEIVLRHAEVLEDGELCVRPLRTAKATDSFVLAGPDEVTLEPTLTFHGFRYAEITGVPDLRAEDVEAVVVGSDLRRTGWFESSHPLLDRFHENVVWGMRGNFLDVPTDCPQRDERLGWTGDIQVFSPTASFLFDTAGFLTNWLADLIAEQHKDGSVPFVVPDVLRQPSPATAAWGDAATIVPWVLYERTGDAGLLARQLPSMRAWVDRMAGLAGDDLLWVGGFQFGDWLDPTAPPDDPFRAKADPDVLATAHLARSAEVVALAAEVVGAGELAREYAELAARVRQAFAAEYTTASGRVLSDAATNYALALQWALLPTEAQRKRAGERLADLVRTAGFRISTGFVGTPLMCDALADSGHPDLAYRLLLETGCPSWLYAVTMDATTVWERWDSMLPDGSINPGQMTSFNHYALGAVADWMHRRVAGLAPGDPGYRRIVVDPLFTAHLTKASARHLTPYGEAAVAWSRSGGRVRLEVTVPVGARARVAVPGESAPVEVGHGTHEWTADDVYGETPPLPADATIRQLIDHEPSWTTLAAAATRTGIVADDAELAGRLERYLDHPATELVDAVSPRGFSPSAEALHAELDSVLGR

SEQ ID NO: 1194 - DNA, 2835 bp, Artificial Sequence
  Codon optimised DNA encoding C-terminal 6xHis amino acid sequence of Seq ID No. 1189
atgagttttccggcagctccggcacgactccgatttgaacatcgaacggacccaggcccggtgttaggtatcggtaccgcgaccccaagattaagctggcaggtccctacagcccctgacgattatcgccaggctggttacgaagttgaaattgcacgtggcgatgccgcgcccgaacagtacacggtcgatagcgccgatcaggtacttgtaccttggccgggcactcctctggcagctcgtgagtcggctacggtccgagtccgtgtgcgaggcgacggggattggtctcagtggtctgaccccgcgacagtcgaagcaggacttctgagcgcggacgactggaccgcccggttcgtgtccccgcgtgagaatgcgggtcacgaagcaccggcgcctctgattggcggagtaattgatctgccggctgatattgcccaggcgcgcttatatgcgactgctcatggcatttatgagcctacgcttaatgggacgcgtgtaggtgatgaacaactggccccgggctggacagcatacgagcagcgcctgcgttatcaaacctatgatgtgaccgacctggtggcacccggcgaaaaccgtttagaactgttggtcggaaacggctggtatcggggtcgcctgggatttcatggtggtcacagtctatatggagatcgtttagcggttttggcacagctcgaagttaccaccgccaccggtgaagttaaagtgctcgcatctgacggtacctggacgacacgtgaaacgaacgtacttgccgacgatctatacgatggccagcacgtggatttgcgtcgtacattaggcgagccgggccctgtagatgtgctagatgccgacttgagtttactggtcgcgcctgatggtccaccagtgcgtgtcaccgacgtgttaccagcgaaggctgttactaccagcccagcaggtaaaaccctagtggattttggtcaaaatgtcgtgggccgcttacgcttacgtgttcgtggaggtgcggcaggggatgagattgttctgcgacacgccgaagtcttggaagacggcgagctcggcgtgcgcccgttgcgtacggccaaagcaactgacagctttgtgcttgcgggcccggatgaggttacactggaaccgacattgactttccatgggttccgctatgcagagattaccggtgtgccggacctgcgcgcggaggacgttgaagccgtggtagttggcagcgatctgcgtcgtaccggatggtttgaatcgtcgcaccccctattagaccgctttcacgaaaacgtagtttggggcatgcgtggcaactttttggatgtcccaaccgattgcccacaacgtgatgagcggttaggttggaccggcgacatacaggtgtttagtccgaccgcgtctttcttattcgatacggcaggctttctgaccaactggcttgcggatctcattgcggaacagcataaagatggtagcgtaccctttgttgtgcctgatgtactgaggcagcctggtcctgcgaccgcggcgtggggtgacgccgcgacaatagtgccgtgggtactgtacgagcgcacaggtgatgccggcctgttagcacgtcaattaccgagcatgcgcgcgtgggttgatcgtatggccggcctggcgggcgatgacctgctgtgggtcggaggtttccaattcggagactggttagatccgacagctcccccggacgatccctttcgagcaaaagccgatccagatgtgctggcaactgcgcacttagctcgttcagccgaagtagtagcgttagcggcagaagtggtgggagcaggcgagttggcgcgtgaatatgcggaacttgcggcgcgtgtccggcaagcatttgcagcagaatatacaaccggctctggtcgggtgttatcagatgctgcaaccaactatgcattagccctgcagtgggcgttgctgccgacggaagctcaacgcaaacgcgccggtgagaggttggctgatctggttcgcacggctggcttccggattagtactggtttcgtaggcacgccattgatggcggatgcgctggcggattctggtcatcctgatcttgcgtatcgcttactgctggagacgggctgtccgtcatggttatacgccgtgacgatggatgcaactactgtctgggagcgctgggattcgatgctgccggatggctcaattaatcctggtcagatgacttctttcaatcactatgcgctcggagcggtggccgattggatgcatcgtcgtgtggcgggtttagcgcccggagatcctggttaccgccgtattgtagtcgatccgctgtttaccgcacatttaaccaaagcatcagcacgacatcttactccgtatggggaagcggccgtggcatggtcgcgttcaggcggtcgtgttcgcttagaagttactgtcccagtaggagctcgggcgagggtagccgtacccggtgaaagcgcacctgtagaagtgggtcacggtactcatgaatggacggccgatgacgtatacggagaaaccccgccccttccagccgacgccacgattcgtcagttaatcgaccatgagccgagttggacaaccttagcggcggcggcgacccgtaccggtatcgtagcggatgacgccgagttagcaggccgtttggaacgctatctggatcatccggccaccgaactcgtggatgcggtttccccacgcggctttagcccgagcgcagaagcactccaggccgagctagacagtgttctgggccgtgaaaacttatattttcagggttctcaccaccatcaccaccactga

SEQ ID NO: 1195 - DNA, 2835 bp, Artificial Sequence
  Codon optimised DNA encoding C-terminal 6xHis amino acid sequence of Seq ID No. 1190
atgagttttccggcagctccggcacgactccgatttgaacatcgaacggacccaggcccggtgttaggtatcggtaccgcgaccccaagattaagctggcaggtccctacagcccctgacgattatcgccaggctggttacgaagttgaaattgcacgtggcgatgccgcgcccgaacagtacacggtcgatagcgccgatcaggtacttgtaccttggccgggcactcctctggcagctcgtgagtcggctacggtccgagtccgtgtgcgaggcgacggggattggtctcagtggtctgaccccgcgacagtcgaagcaggacttctgagcgcggacgactggaccgcccggttcgtgtccccgcgtgagaatgcgggtcacgaagcaccggcgcctctgattggcggagtaattgatctgccgccggatattgcccaggcgcgcttatatgcgactgctcatggcatttatgagcctacgcttaatgggacgcgtgtaggtgatgaacaactggccccgggctggacagcatacgagcagcgcctgcgttatcaaacctatgatgtgaccgacctggtggcacccggcgaaaaccgtttagaactgttggtcggaaacggctggtatcggggtcgcatgggatttcatggtggtcacagtctatatggagatcgtttagcggttttggcacagctcgaagttaccaccgccaccggtgaagttaaagtgctcgcatctgacggtacctggacgacacgtgaaacgaacgtacttgccgacgatctatacgatggccagcacgtggatttgcgtcgtacattaggcgagccgggccctgtagatgtgctagatgccgacttgagtttactggtcgcgcctgatggtccaccagtgcgtgtcaccgacgtgttaccagcgaaggctgttactaccagcccagcaggtaaaaccctagtggattttggtcaaaatgtcgtgggccgcttacgcttacgtgttcgtggaggtgcggcaggggatgagattgttctgcgacacgccgaagtcttggaagacggcgagctcggcgtgcgcccgttgcgtacggccaaagcaactgacagctttgtgcttgcgggcccggatgaggttacactggaaccgacattgactttccatgggttccgctatgcagagattaccggtgtgccggacctgcgcgcggaggacgttgaagccgtggtagttggcagcgatctgcgtcgtaccggatggtttgaatcgtcgcaccccctattagaccgctttcacgaaaacgtagtttggggcatgcgtggcaactttttggatgtcccaaccgattgcccacaacgtgatgagcggttaggttggaccggcgacatacaggtgtttagtccgaccgcgtctttcttattcgatacggcaggctttctgaccaactggcttgcggatctcattgcggaacagcataaagatggtagcgtaccctttgttgtgcctgatgtactgaggcagcctggtcctgcgaccgcggcgtggggtgacgccgcgacaatagtgccgtgggtactgtacgagcgcacaggtgatgccggcctgttagcacgtcaattaccgagcatgcgcgcgtgggttgatcgtatggccggcctggcgggcgatgacctgctgtgggtcggaggtttccaattcggagactggcttgatccgacagctcccccggacgatccctttcgcgcaaaagccgatccggatgtgctggcaactgcgcacttagctcgttcagccgaagtagtagcgttagcggcagaagtggtgggagcaggcgagttggcgcgtgaatatgcggaacttgcggcgcgtgtccggcaagcatttgcagcagaatatacaaccggctctggtcgggtgttatcagatgctgcaaccaactatgcattagccctgcagtgggcgttgctgccgacggaagctcaacgcaaacgcgccggtgagaggttggctgatctggttcgcacggctggcttccggattagtactggtttcgtaggcacgccattgatggcggatgcgctggcggattctggtcatcctgatcttgcgtatcgcttactgctggagacgggctgtccgtcatggttatacgccgtgacgatggatgcaactactgtctgggagcgctgggattcgatgctgccggatggctcaattaatcctggtcagatgacttctttcaatcactatgcgctcggagcggtggccgattggatgcatcgtcgtgtggcgggtttagcgcccggagatcctggttaccgccgtattgtagtcgatccgctgtttaccgcacatttaaccaaagcatcagcacgacatcttactccgtatggggaagcggccgtggcatggtcgcgttcaggcggtcgtgttcgcttagaagttactgtcccagtaggagctcgggcgagggtagccgtacccggtgaaagcgcacctgtagaagtgggtcacggtactcatgaatggacggccgatgacgtatacggagaaaccccgccccttccagccgacgccacgattcgtcagttaatcgaccatgagccgagttggacaaccttagcggcggcggcgacccgtaccggtatcgtagcggatgacgccgagttagcaggccgtttggaacgctatctggatcatccggccaccgaactcgtggatgcggtttccccacgcggctttagcccgagcgcagaagcactccacgccgagctagacagtgttctgggccgtgaaaacttatattttcagggttctcaccaccatcaccaccactga

SEQ ID NO: 1196 - DNA, 2835 bp, Artificial Sequence
  Codon optimised DNA encoding C-terminal 6xHis amino acid sequence of Seq ID No. 1191
atgagttttccggcagctccggcacgactccgatttgaacatcgaacggacccaggcccggtgttaggtatcggtaccgcgaccccaagattaagctggcaggtccctacagcccctgacgattatcgccaggctggttacgaagttgaaattgcacgtggcgatgccgcgcccgaacagtacacggtcgatagcgccgatcaggtacttgtaccttggccgggcactcctctggcagctcgtgagtcggctacggtccgagtccgtgtgcgaggcgacggggattggtctcagtggtctgaccccgcgacagtcgaagcaggacttctgagcgcggacgactggaccgcccggttcgtgtccccgcgtgagaatgcgggtcacgaagcaccggcgcctctgattggcggagtaattgatctgccgccggatattgcccaggcgcgcttatatgcgactgctcatggcatttatgagcctacgcttaatgggacgcgtgtaggtgatgaacaactggccccgggctggacagcatacgagcagcgcctgcgttatcaaacctatgatgtgaccgacctggtggcacccggcgaaaaccgtttagaactgttggtcggaaacggctggtatcggggtcgcatgggatttcatggtggtcacagtctatatggagatcgtttagcggttttggcacagctcgaagttaccaccgccaccggtgaagttaaagtgctcgcatctgacggtacctggacgacacgtgaaacgaacgtacttgccgacgatctatacgatggccagcacgtggatttgcgtcgtacattaggcgagccgggccctgtagatgtgctagatgccgacttgagtttactggtcgcgcctgatggtccaccagtgcgtgtcaccgacgtgttaccagcgaaggctgttactaccagcccagcaggtaaaaccctagtggattttggtcaaaatgtcgtgggccgcttacgcttacgtgttcgtggaggtgcggcaggggatgagattgttctgcgacacgccgaagtcttggaagacggcgagctctgtgtgcgcccgttgcgtacggccaaagcaactgacagctttgtgcttgcgggcccggatgaggttacactggaaccgacattgactttccatgggttccgctatgcagagattaccggtgtgccggacctgcgcgcggaggacgttgaagccgtggtagttggcagcgatctgcgtcgtaccggatggtttgaatcgtcgcaccccctattagaccgctttcacgaaaacgtagtttggggcatgcgtggcaactttttggatgtcccaaccgattgcccacaacgtgatgagcggttaggttggaccggcgacatacaggtgtttagtccgaccgcgtctttcttattcgatacggcaggctttctgaccaactggcttgcggatctcattgcggaacagcataaagatggtagcgtaccctttgttgtgcctgatgtactgaggcagcctggtcctgcgaccgcggcgtggggtgacgccgcgacaatagtgccgtgggtactgtacgagcgcacaggtgatgccggcctgttagcacgtcaattaccgagcatgcgcgcgtgggttgatcgtatggccggcctggcgggcgatgacctgctgtgggtcggaggtttccaattcggagactggcttgatccgacagctcccccggacgatccctttcgcgcaaaagccgatccggatgtgctggcaactgcgcacttagctcgttcagccgaagtagtagcgttagcggcagaagtggtgggagcaggcgagttggcgcgtgaatatgcggaacttgcggcgcgtgtccggcaagcatttgcagcagaatatacaaccggctctggtcgggtgttatcagatgctgcaaccaactatgcattagccctgcagtgggcgttgctgccgacggaagctcaacgcaaacgcgccggtgagaggttggctgatctggttcgcacggctggcttccggattagtactggtttcgtaggcacgccattgatggcggatgcgctggcggattctggtcatcctgatcttgcgtatcgcttactgctggagacgggctgtccgtcatggttatacgccgtgacgatggatgcaactactgtctgggagcgctgggattcgatgctgccggatggctcaattaatcctggtcagatgacttctttcaatcactatgcgctcggagcggtggccgattggatgcatcgtcgtgtggcgggtttagcgcccggagatcctggttaccgccgtattgtagtcgatccgctgtttaccgcacatttaaccaaagcatcagcacgacatcttactccgtatggggaagcggccgtggcatggtcgcgttcaggcggtcgtgttcgcttagaagttactgtcccagtaggagctcgggcgagggtagccgtacccggtgaaagcgcacctgtagaagtgggtcacggtactcatgaatggacggccgatgacgtatacggagaaaccccgccccttccagccgacgccacgattcgtcagttaatcgaccatgagccgagttggacaaccttagcggcggcggcgacccgtaccggtatcgtagcggatgacgccgagttagcaggccgtttggaacgctatctggatcatccggccaccgaactcgtggatgcggtttccccacgcggctttagcccgagcgcagaagcactccacgccgagctagacagtgttctgggccgtgaaaacttatattttcagggttctcaccaccatcaccaccactga

SEQ ID NO: 1197 - DNA, 2835 bp, Artificial Sequence
  Codon optimised DNA encoding C-terminal 6xHis amino acid sequence of Seq ID No. 1192
atgagttttccggcagctccggcacgactccgatttgaacatcgaacggacccaggcccggtgttaggtatcggtaccgcgaccccaagattaagctggcaggtccctacagcccctgacgattatcgccaggctggttacgaagttgaaattgcacgtggcgatgccgcgcccgaacagtacacggtcgatagcgccgatcaggtacttgtaccttggccgggcactcctctggcagctcgtgagtcggctacggtccgagtccgtgtgcgaggcgacggggattggtctcagtggtctgaccccgcgacagtcgaagcaggacttctgagcgcggacgactggaccgcccggttcgtgtccccgcgtgagaatgcgggtcacgaagcaccggcgcctctgattggcggagtaattgatctgccgccggatattgcccaggcgcgcttatatgcgactgctcatggcatttatgagcctacgcttaatgggacgcgtgtaggtgatgaacaactggccccgggctggacagcatacgagcagcgcctgcgttatcaaacctatgatgtgaccgacctggtggcacccggcgaaaaccgtttagaactgttggtcggaaacggctggtatcggggtcgcatgagctttcataacggtcacagtctatatggagatcgtttagcggttttggcacagctcgaagttaccaccgccaccggtgaagttaaagtgctcgcatctgacggtacctggacgacacgtgaaacgaacgtacttgccgacgatctatacgatggccagcacgtggatttgcgtcgtacattaggcgagccgggccctgtagatgtgctagatgccgacttgagtttactggtcgcgcctgatggtccaccagtgcgtgtcaccgacgtgttaccagcgaaggctgttactaccagcccagcaggtaaaaccctagtggattttggtcaaaatgtcgtgggccgcttacgcttacgtgttcgtggaggtgcggcaggggatgagattgttctgcgacacgccgaagtcttggaagacggcgagctctgtgtgcgcccgttgcgtacggccaaagcaactgacagctttgtgcttgcgggcccggatgaggttacactggaaccgacattgactttccatgggttccgctatgcagagattaccggtgtgccggacctgcgcgcggaggacgttgaagccgtggtagttggcagcgatctgcgtcgtaccggatggtttgaatcgtcgcaccccctattagaccgctttcacgaaaacgtagtttggggcatgcgtggcaactttttggatgtcccaaccgattgcccacaacgtgatgagcggttaggttggaccggcgacatacaggtgtttagtccgaccgcgtctttcttattcgatacggcaggctttctgaccaactggcttgcggatctcattgcggaacagcataaagatggtagcgtaccctttgttgtgcctgatgtactgaggcagcctagccctgcgaccgcggcgtggggtgacgccgcgacaatagtgccgtgggtactgtacgagcgcacaggtgatgccggcctgttagcacgtcaattaccgagcatgcgcgcgtgggttgatcgtatggccggcctggcgggcgatgacctgctgtgggtcggaggtttccaattcggagactggcttgatccgacagctcccccggacgatccctttcgcgcaaaagccgatccggatgtgctggcaactgcgcacttagctcgttcagccgaagtagtagcgttagcggcagaagtggtgggagcaggcgagttggcgcgtgaatatgcggaacttgcggcgcgtgtccggcaagcatttgcagcagaatatacaaccgcctctggtcgggtgttatcagatgctgcaaccaactatgcattagccctgcagtgggcgttgctgccgacggaagctcaacgcaaacgcgccggtgagaggttggctgatctggttcgcacggctggcttccggattagtactggtttcgtaggcacgccattgatggcggatgcgctggcggattctggtcatcctgatcttgcgtatcgcttactgctggagacgggctgtccgtcatggttatacgccgtgacgatggatgcaactactgtctgggagcgctgggattcgatgctgccggatggctcaattaatcctggtcagatgacttctttcaatcactatgcgctcggagcggtggccgattggatgcatcgtcgtgtggcgggtttagcgcccggagatcctggttaccgccgtattgtagtcgatccgctgtttaccgcacatttaaccaaagcatcagcacgacatcttactccgtatggggaagcggccgtggcatggtcgcgttcaggcggtcgtgttcgcttagaagttactgtcccagtaggagctcgggcgagggtagccgtacccggtgaaagcgcacctgtagaagtgggtcacggtactcatgaatggacggccgatgacgtatacggagaaaccccgccccttccagccgacgccacgattcgtcagttaatcgaccatgagccgagttggacaaccttagcggcggcggcgacccgtaccggtatcgtagcggatgacgccgagttagcaggccgtttggaacgctatctggatcatccggccaccgaactcgtggatgcggtttccccacgcggctttagcccgagcgcagaagcactccacgccgagctagacagtgttctgggccgtgaaaacttatattttcagggttctcaccaccatcaccaccactga

SEQ ID NO: 1198 - DNA, 2835 bp, Artificial Sequence
  Codon optimised DNA encoding C-terminal 6xHis amino acid sequence of Seq ID No. 1193
atgagttttccggcagctccggcacgactccgatttgaacatcgaacggacccaggcccggtgttaggtatcggtaccgcgaccccaagattaagctggcaggtccctacagcccctgacgattatcgccaggctggttacgaagttgaaattgcacgtggcgatgccgcgcccgaacagtacacggtcgatagcgccgatcaggtacttgtaccttggccgggcactcctctggcagctcgtgagtcggctacggtccgagtccgtgtgcgaggcgacggggattggtctcagtggtctgaccccgcgacagtcgaagcaggacttctgagcgcggacgactggaccgcccggttcgtgtccccgcgtgagaatgcgggtcacgaagcaccggcgcctctgattggcggagtaattgatctgccgccggatattgcccaggcgcgcttatatgcgactgctcatggcatttatgagcctacgcttaatgggacgcgtgtaggtgatgaacaactggccccgggctggacagcatacgagcagcgcctgcgttatcaaacctatgatgtgaccgacctggtggcacccggcgaaaaccgtttagaactgttggtcggaaacggctggtatcggggtcgcatgagctttcatgatggtcacagtctatatggagatcgtttagcggttttggcacagctcgaagttaccaccgccaccggtgaagttaaagtgctcgcatctgacggtacctggacgacacgtgaaacgaacgtacttgccgacgatctatacgatggccagcacgtggatttgcgtcgtacattaggcgagccgggccctgtagatgtgctagatgccgacttgagtttactggtcgcgcctgatggtccaccagtgcgtgtcaccgacgtgttaccagcgaaggctgttactaccagcccagcaggtaaaaccctagtggattttggtcaaaatgtcgtgggccgcttacgcttacgtgttcgtggaggtgcggcaggggatgagattgttctgcgacacgccgaagtcttggaagacggcgagctctgtgtgcgcccgttgcgtacggccaaagcaactgacagctttgtgcttgcgggcccggatgaggttacactggaaccgacattgactttccatgggttccgctatgcagagattaccggtgtgccggacctgcgcgcggaggacgttgaagccgtggtagttggcagcgatctgcgtcgtaccggatggtttgaatcgtcgcaccccctattagaccgctttcacgaaaacgtagtttggggcatgcgtggcaactttttggatgtcccaaccgattgcccacaacgtgatgagcggttaggttggaccggcgacatacaggtgtttagtccgaccgcgtctttcttattcgatacggcaggctttctgaccaactggcttgcggatctcattgcggaacagcataaagatggtagcgtaccctttgttgtgcctgatgtactgaggcagcctagccctgcgaccgcggcgtggggtgacgccgcgacaatagtgccgtgggtactgtacgagcgcacaggtgatgccggcctgttagcacgtcaattaccgagcatgcgcgcgtgggttgatcgtatggccggcctggcgggcgatgacctgctgtgggtcggaggtttccaattcggagactggcttgatccgacagctcccccggacgatccctttcgcgcaaaagccgatccggatgtgctggcaactgcgcacttagctcgttcagccgaagtagtagcgttagcggcagaagtggtgggagcaggcgagttggcgcgtgaatatgcggaacttgcggcgcgtgtccggcaagcatttgcagcagaatatacaaccgcctctggtcgggtgttatcagatgctgcaaccaactatgcattagccctgcagtgggcgttgctgccgacggaagctcaacgcaaacgcgccggtgagaggttggctgatctggttcgcacggctggcttccggattagtactggtttcgtaggcacgccattgatgtgcgatgcgctggcggattctggtcatcctgatcttgcgtatcgcttactgctggagacgggctgtccgtcatggttatacgccgtgacgatggatgcaactactgtctgggagcgctgggattcgatgctgccggatggctcaattaatcctggtcagatgacttctttcaatcactatgcgctcggagcggtggccgattggatgcatcgtcgtgtggcgggtttagcgcccggagatcctggttaccgccgtattgtagtcgatccgctgtttaccgcacatttaaccaaagcatcagcacgacatcttactccgtatggggaagcggccgtggcatggtcgcgttcaggcggtcgtgttcgcttagaagttactgtcccagtaggagctcgggcgagggtagccgtacccggtgaaagcgcacctgtagaagtgggtcacggtactcatgaatggacggccgatgacgtatacggagaaaccccgccccttccagccgacgccacgattcgtcagttaatcgaccatgagccgagttggacaaccttagcggcggcggcgacccgtaccggtatcgtagcggatgacgccgagttagcaggccgtttggaacgctatctggatcatccggccaccgaactcgtggatgcggtttccccacgcggctttagcccgagcgcagaagcactccacgccgagctagacagtgttctgggccgtgaaaacttatattttcagggttctcaccaccatcaccaccactga
